(19) United States
(12) Patent Application Publication
(10) Pub. No.: US 2009/0305993 A1
(43) Pub. Date: Dec. 10, 2009

(54) METHODS AND COMPOSITION FOR THE TREATMENT OF GASTROINTESTINAL DISORDERS

(75) Inventor: Mark G. Currie, Sterling, MA (US)

Correspondence Address: HONIGMAN MILLER SCHWARTZ & COHN LLP, 444 WEST MICHIGAN AVENUE, KALAMAZOO, MI, 49007-3714, US

(73) Assignee: IRONWOOD PHARMACEUTICALS, INC., Cambridge, MA (US)

(21) Appl. No.: 12/280,376

(22) PCT Filed: Feb. 26, 2007
(86) PCT No.: PCT/US07/62820

§ 371 Date: Dec. 29, 2008

Related U.S. Application Data
(60) Provisional application No. 60/777,284, filed on Feb. 24, 2006.

(51) Int. Cl. A61K 38/10; C07K 7/08

(52) U.S. Cl. 514/13; 514/14; 530/326; 530/327

(57) ABSTRACT

Pharmaceutical compositions comprising certain peptides that are capable of activating the guanylate-cyclase C (GC-C) receptor are described as are the peptides and method for using the peptides and pharmaceutical compositions for treating gastrointestinal disorders and other disorder.

### TECHNICAL FIELD

[0001] This invention relates to methods and compositions for treating various disorders, including gastrointestinal disorders, obesity, congestive heart failure and benign prostatic hyperplasia.

### BACKGROUND

[0002] Irritable bowel syndrome (IBS) is a common chronic disorder of the intestine that affects 20 to 60 million individuals in the US alone (Lehman Brothers, Global Healthcare-Irritable bowel syndrome industry update, September 1999). IBS is the most common disorder diagnosed by gastroenterologists (28% of patients examined) and accounts for 12% of visits to primary care physicians (Camilleri 2001, Gastroenterology 120:652-668). In the US, the economic impact of IBS is estimated at $25 billion annually, through direct costs of health care use and indirect costs of absenteeism from work (Talley 1995, Gastroenterology 109:1736-1741). Patients with IBS have three times more absenteeism from work and report a reduced quality of life. Sufferers may be unable or unwilling to attend social events, maintain employment, or travel even short distances (Drossman 1993, Dig Dis Sci 38:1569-1580). There is a tremendous unmet medical need in this population since few prescription options exist to treat IBS.

[0003] Patients with IBS suffer from abdominal pain and a disturbed bowel pattern. Three subgroups of IBS patients have been defined based on the predominant bowel habit: constipation-predominant (c-IBS), diarrhea-predominant (d-IBS) or alternating between the two (a-IBS). Estimates of individuals who suffer from c-IBS range from 20-50% of the IBS patients with 30% frequently cited. In contrast to the other two subgroups that have a similar gender ratio, c-IBS is more common in women (ratio of 3:1) (Talley et al. 1995, Am J Epidemiol 142:76-83).

[0004] The definition and diagnostic criteria for IBS have been formalized in the “Rome Criteria” (Drossman et al. 1999, Gut 45:Suppl II: 1-81), which are well accepted in clinical practice. Briefly, the criteria specify that for at least 12 weeks (consecutive or non-consecutive in the preceding 12 months of abdominal discomfort or pain at least two of the following three features must occur: (1) relieved with defecation, (2) onset associated with a change in frequency of stool, and (3) onset associated with a change in form (appearance) of stool. The Rome II criteria also state that the symptoms that cumulatively support the diagnosis of irritable bowel syndrome include: abnormal stool frequency (“abnormal” may be defined as greater than 3 bowel movements per day and less than 3 bowel movements per week), abnormal stool form (lumpy/hard or loose/watery stool), abnormal stool passage (straining, urgency, or feeling of incomplete evacuation), passage of mucus, and bloating or feeling of abdominal distension. However, the complexity of symptoms has not been explained by anatomical abnormalities or metabolic changes. This has led to the classification of IBS as a functional GI disorder, which is diagnosed on the basis of the Rome criteria and limited evaluation to exclude organic disease (Ringel et al. 2001, Annu Rev Med 52: 319-338). IBS is considered to be a “biopsychosocial” disorder resulting from a combination of three interacting mechanisms: altered bowel motility, an increased sensitivity of the intestine or colon to pain stimuli (visceral sensitivity) and psychosocial factors (Camilleri 2001, Gastroenterology 120:652-668). Recently, there has been increasing evidence for a role of inflammation in etiology of IBS. Reports indicate that subsets of IBS patients have small but significant increases in colonic inflammatory and mast cells, increased inducible nitric oxide (NO) and synthase (iNOS) and altered expression of inflammatory cytokines (reviewed by Talley 2000, Medscape Coverage of DDW week).

[0005] The present invention features peptides that activate and/or bind the guanylate cyclase-C (GC-C) receptor (reviewed by Lucas et al. 2000 Pharmacol. Rev 52:375-414 and Vaandrager et al. 2002 Molecular and Cellular Biochemistry 230:73-83) and any of its variants, including but not limited to insertion, deletion, mutation, and splice variants. GC-C is a key regulator in mammals of intestinal function (although low levels of GC-C have been detected in other tissues). GC-C responds to the endogenous hormones, guanylin and uroguanylin, and to enteric bacterial peptides from the heat stable enterotoxin family (ST peptides). When agonists bind to GC-C, there is an elevation of the second messenger, cyclic GMP, and an increase in chloride and bicarbonate secretion, resulting in an increase in intestinal fluid secretion. The Genbank GI accession number for guanylyl cyclase C homologs from multiple organisms are:

| Genbank ® | |
|---|---|
| GI number | Organism |
| 27806993 | Cattle |
| 16555439 | Eel |
| 16555437 | Eel |
| 4521169 | Fish |
| 1850774 | Frog |
| 1495352 | guinea pig |
| 2494861 | guinea pig |
| 4826752 | Human |
| 4505441 | Human |
| 1184046 | Human |
| 1230617 | Mouse |
| 2708786 | mouse |
| 71894985 | mouse |
| 47523018 | pig |
| 5930067 | rabbit |
| 6981000 | rat |
| 40445437 | worm |

### SUMMARY

[0006] The present invention features compositions and related methods for treating IBS and other gastrointestinal disorders and conditions (e.g., gastrointestinal motility disorders, chronic intestinal pseudo-obstruction, colonic pseudo-obstruction, Crohn's disease, duodenogastric reflux, dyspepsia, functional dyspepsia, nonulcer dyspepsia, a functional gastrointestinal disorder, functional heartburn, gastroesophageal reflux disease (GERD), gastroparesis, irritable bowel syndrome, post-operative ileus, ulcerative colitis, chronic constipation, and disorders and conditions associated with constipation (e.g. constipation associated with use of opiate pain killers, post-surgical constipation, and constipation associated with neuropathic disorders as well as other conditions and disorders are described herein The compositions feature peptides that activate the guanylate cyclase C (GC-C) receptor.

[0007] The present invention also features compositions and related methods for treating obesity, congestive heart failure (including congestive heart failure at any of stages I-IV according to New York Heart Association (NYHA) Functional Classification) and benign prostatic hyperplasia (BPH).

[0008] Without being bound by any particular theory, in the case of IBS and other gastrointestinal disorders the peptides are useful because they may increase gastrointestinal motility.

[0009] Without being bound by any particular theory, in the case of IBS and other gastrointestinal disorders the peptides are useful, in part, because they may decrease inflammation.

[0010] Without being bound by any particular theory, in the case of IBS and other gastrointestinal disorders the peptides are also useful because they may decrease gastrointestinal pain, visceral pain, chronic visceral hypersensitivity, or hypersensitivity to colorectal distension.

[0011] Without being bound by any particular theory, in the case of salt retention, fluid retention disorders and combinations thereof the polypeptides are also useful because they may elicit one or more of diuresis, naturesis and/or kaliuresis. Thus the peptides described herein may be diuretics.

[0012] The invention features pharmaceutical compositions comprising certain peptides that are capable of activating the guanylate-cyclase C (GC-C) receptor. Also within the invention are pharmaceutical compositions comprising a peptide or GC-C agonist of the invention and one or more additional therapeutic agents including, without limitation, the agents described herein. The other agents can be administered with the peptides of the invention (simultaneously or sequentially). They can also be linked to a peptide of the invention to create therapeutic conjugates.

[0013] Described herein is a polypeptide or a salt thereof comprising the amino acid sequence:

A′-B′-C′-D′-E′ wherein:

[0014] A′ is an amino acid sequence comprising a pre sequence depicted in FIG. 21 or is missing;

[0015] B′ is an amino acid sequence comprising a pro sequence depicted in FIG. 21 or is missing;

[0016] C′ is an amino acid sequence comprising an N-terminal non-core sequence depicted in FIG. 21 or is missing;

[0017] D′ is an amino acid sequence comprising a GC-C receptor agonist polypeptide amino acid sequence; and

[0018] E′ is an amino acid sequence comprising a C-terminal non-core sequence depicted in FIG. 21 or is missing;

wherein one or more Asn having the structure:

[chemical structure]

is optionally replaced by a group having a structure selected from (a), (b) and (c):

[chemical structure]

provided that an Asn at the carboxy terminus is not replaced by structure (a) or structure (c).

[0019] In some embodiments: D′ comprises the amino acid sequence Xaa₁ Xaa₂ Xaa₃ Xaa₄ Xaa₅ Cys₆ Cys₇ Xaa₈ Xaa₉ Cys₁₀ Cys₁₁ Xaa₁₂ Xaa₁₃ Xaa₁₄ Cys₁₅ Xaa₁₆ Xaa₁₇ Cys₁₈ Xaa₁₉ Xaa₂₀ Xaa₂₁ (SEQ ID NO: 1) wherein:

[0020] Xaa₈, Xaa₉, Xaa₁₂, Xaa₁₃, Xaa₁₄, Xaa₁₆ and Xaa₁₇ are independently any amino acid;

[0021] Xaa₁, Xaa₂, Xaa₃, Xaa₄ and Xaa₅ are independently any amino acid or one or more amino acids within the sequence Xaa₁ Xaa₂ Xaa₃ Xaa₄ Xaa₅ is missing;

[0022] Xaa₁₉, Xaa₂₀ and Xaa₂₁ are independently any amino acid or one or more amino acids within the sequence Xaa₁₉ Xaa₂₀ Xaa₂₁ is missing; or the sequence Xaa₂₀ Xaa₂₁ is missing and Xaa₁₉ is any amino acid, or the sequence Xaa₂₀ Xaa₂₁ is missing and Xaa₁₉ is Tyr;

wherein one or more Asn is optionally replaced by a group having a structure selected from (a), (b) and (c).

[0023] In some embodiments: the sequence Xaa₁ Xaa₂ Xaa₃ Xaa₄ Xaa₅ is missing;

[0024] Xaa₁₉ Xaa₂₀ Xaa₂₁ is missing or the sequence Xaa₂₀ Xaa₂₁ is missing and Xaa₁₉ is Tyr;

[0025] Xaa₈ is Glu;

[0026] Xaa₉ is Leu, Tyr, Phe or Trp;

[0027] Xaa₁₂ is Asn;

[0028] Xaa₁₃ is Pro;

[0029] Xaa₁₄ is Ala;

[0030] Xaa₁₆ is Thr; and

[0031] Xaa₁₇ is Gly,

wherein one or more Asn is optionally replaced by a group having a structure selected from (a), (b) and (c).

[0032] In some embodiments: E′ is missing.

[0033] In some embodiments: A′ is an amino acid sequence comprising a pre sequence depicted in FIG. 21;

[0034] B′ is an amino acid sequence comprising a pro sequence depicted in FIG. 21; and

[0035] C′ is an amino acid sequence comprising an N-terminal non-core sequence depicted in FIG. 21,

wherein one or more Asn is optionally replaced by a group having a structure selected from (a), (b) and (c).

[0036] In some embodiments: A′ is an amino acid sequence consisting of a pre sequence depicted in FIG. 21;

[0037] B′ is an amino acid sequence consisting of a pro sequence depicted in FIG. 21; and

[0038] C′ is an amino acid sequence consisting of an N-terminal non-core sequence depicted in FIG. 21,

wherein one or more Asn is optionally replaced by a group having a structure selected from (a), (b) and (c).

[0039] In some embodiments the polypeptide is selected from:

[0040] (a) a polypeptide comprising A′, B′, C′, D′ and E′, wherein one or more Asn is optionally replaced by a group having a structure selected from (a), (b) and (c);

[0041] (b) a polypeptide comprising B′, C′, D′ and E′, wherein one or more Asn is optionally replaced by a group having a structure selected from (a), (b) and (c).

[0042] (c) a polypeptide comprising C′, D′ and E′, wherein one or more Asn is optionally replaced by a group having a structure selected from (a), (b) and (c);

[0043] (d) a polypeptide comprising B′, C′, and D′, wherein one or more Asn is optionally replaced by a group having a structure selected from (a), (b) and (c);

[0044] (e) a polypeptide comprising C′, and D′, wherein one or more Asn is optionally replaced by a group having a structure selected from (a), (b) and (c);

[0045] (f) a polypeptide comprising D‘ and E’, wherein one or more Asn is optionally replaced by a group having a structure selected from (a), (b) and (c);

[0046] (g) a polypeptide comprising A′, B′, C′, and D′, wherein one or more Asn is optionally replaced by a group having a structure selected from (a), (b) and (c); and

[0047] (h) a polypeptide comprising D′, wherein one or more Asn is optionally replaced by a group having a structure selected from (a), (b) and (c).

[0048] In some embodiments the polypeptide is selected from:

[0049] (a) a polypeptide consisting of A′, B′, C′, D′ and E′, wherein one or more Asn is optionally replaced by a group having a structure selected from (a), (b) and (c);

[0050] (b) a polypeptide consisting of B′, C′, D′ and E′, wherein one or more Asn is optionally replaced by a group having a structure selected from (a), (b) and (c).

[0051] (c) a polypeptide consisting of C′, D′ and E′, wherein one or more Asn is optionally replaced by a group having a structure selected from (a), (b) and (c);

[0052] (d) a polypeptide consisting of B′, C′, and D′, wherein one or more Asn is optionally replaced by a group having a structure selected from (a), (b) and (c);

[0053] (e) a polypeptide consisting of C′, and D′, wherein one or more Asn is optionally replaced by a group having a structure selected from (a), (b) and (c);

[0054] (f) a polypeptide consisting of D′ and E′, wherein one or more Asn is optionally replaced by a group having a structure selected from (a), (b) and (c);

[0055] (g) a polypeptide consisting of A′, B′, C′, and D′, wherein one or more Asn is optionally replaced by a group having a structure selected from (a), (b) and (c); and

[0056] (h) a polypeptide consisting of D′, wherein one or more Asn is optionally replaced by a group having a structure selected from (a), (b) and (c).

[0057] In some embodiments the polypeptide is selected from:

[0058] (a) a polypeptide consisting essentially of A′, B′, C′, D′ and E′, wherein one or more Asn is optionally replaced by a group having a structure selected from (a), (b) and (c);

[0059] (b) a polypeptide consisting essentially of B′, C′, D′ and E′, wherein one or more Asn is optionally replaced by a group having a structure selected from (a), (b) and (c).

[0060] (c) a polypeptide consisting essentially of C′, D′ and E′, wherein one or more Asn is optionally replaced by a group having a structure selected from (a), (b) and (c);

[0061] (d) a polypeptide consisting essentially of B′, C′, and D′, wherein one or more Asn is optionally replaced by a group having a structure selected from (a), (b) and (c);

[0062] (e) a polypeptide consisting essentially of C′, and D′, wherein one or more Asn is optionally replaced by a group having a structure selected from (a), (b) and (c);

[0063] (f) a polypeptide consisting essentially of D′ and E′, wherein one or more Asn is optionally replaced by a group having a structure selected from (a), (b) and (c);

[0064] (g) a polypeptide consisting essentially of A′, B′, C′, and D′, wherein one or more Asn is optionally replaced by a group having a structure selected from (a), (b) and (c); and

[0065] (h) a polypeptide consisting essentially of D′, wherein one or more Asn is optionally replaced by a group having a structure selected from (a), (b) and (c)

[0066] In some embodiments the polypeptide is selected from:

[0067] (a) a polypeptide comprising A′, B′, C′, D′ and E′, wherein one or more Asn is replaced by a group having a structure selected from (a), (b) and (c);

[0068] (b) a polypeptide comprising B′, C′, D′ and E′, wherein one or more Asn is replaced by a group having a structure selected from (a), (b) and (c).

[0069] (c) a polypeptide comprising C′, D′ and E′, wherein one or more Asn is replaced by a group having a structure selected from (a), (b) and (c);

[0070] (d) a polypeptide comprising B′, C′, and D′, wherein one or more Asn is replaced by a group having a structure selected from (a), (b) and (c);

[0071] (e) a polypeptide comprising C′, and D′, wherein one or more Asn is replaced by a group having a structure selected from (a), (b) and (c);

[0072] (f) a polypeptide comprising D′ and E′, wherein one or more Asn is replaced by a group having a structure selected from (a), (b) and (c);

[0073] (g) a polypeptide comprising A′, B′, C′, and D′, wherein one or more Asn is replaced by a group having a structure selected from (a), (b) and (c); and

[0074] (h) a polypeptide comprising D′, wherein one or more Asn is replaced by a group having a structure selected from (a), (b) and (c).

[0075] In some embodiments the polypeptide is selected from:

[0076] (a) a polypeptide consisting of A′, B′, C′, D′ and E′, wherein one or more Asn is replaced by a group having a structure selected from (a), (b) and (c);

[0077] (b) a polypeptide consisting of B′, C′, D′ and E′, wherein one or more Asn is replaced by a group having a structure selected from (a), (b) and (c).

[0078] (c) a polypeptide consisting of C′, D′ and E′, wherein one or more Asn is replaced by a group having a structure selected from (a), (b) and (c);

[0079] (d) a polypeptide consisting of B′, C′, and D′, wherein one or more Asn is replaced by a group having a structure selected from (a), (b) and (c);

[0080] (e) a polypeptide consisting of C′, and D′, wherein one or more Asn is replaced by a group having a structure selected from (a), (b) and (c);

[0081] (f) a polypeptide consisting of D′ and E′, wherein one or more Asn is replaced by a group having a structure selected from (a), (b) and (c);

[0082] (g) a polypeptide consisting of A′, B′, C′, and D′, wherein one or more Asn is replaced by a group having a structure selected from (a), (b) and (c); and

[0083] (h) a polypeptide consisting of D′, wherein one or more Asn is replaced by a group having a structure selected from (a), (b) and (c).

[0084] In some embodiments the polypeptide is selected from:

[0085] (a) a polypeptide consisting essentially of A′, B′, C′, D′ and E′, wherein one or more Asn is replaced by a group having a structure selected from (a), (b) and (c);

[0086] (b) a polypeptide consisting essentially of B′, C′, D′ and E′, wherein one or more Asn is replaced by a group having a structure selected from (a), (b) and (c).

[0087] (c) a polypeptide consisting essentially of C′, D′ and E′, wherein one or more Asn is replaced by a group having a structure selected from (a), (b) and (c);

[0088] (d) a polypeptide consisting essentially of B′, C′, and D′, wherein one or more Asn is replaced by a group having a structure selected from (a), (b) and (c);

[0089] (e) a polypeptide consisting essentially of C′, and D′, wherein one or more Asn is replaced by a group having a structure selected from (a), (b) and (c);

[0090] (f) a polypeptide consisting essentially of D′ and E′, wherein one or more Asn is replaced by a group having a structure selected from (a), (b) and (c);

[0091] (g) a polypeptide consisting essentially of A′, B′, C′, and D′, wherein one or more Asn is replaced by a group having a structure selected from (a), (b) and (c); and

[0092] (h) a polypeptide consisting essentially of D′, wherein one or more Asn is replaced by a group having a structure selected from (a), (b) and (c).

[0093] In some case the polypeptide comprises the amino acid sequence:

[0094] A′-B′-C′-D′-E′ wherein:

[0095] A′ is an amino acid sequence comprising a pre sequence depicted in FIG. 21;

[0096] B′ is an amino acid sequence comprising a pro sequence depicted in FIG. 21;

[0097] C′ is an amino acid sequence comprising an N-terminal non-core sequence depicted in FIG. 21;

[0098] D′ is an amino acid sequence comprising a GC-C receptor agonist polypeptide amino acid sequence; and

[0099] E′ is an amino acid sequence comprising a C-terminal non-core sequence depicted in FIG. 21,

wherein one or more Asn is optionally replaced by a group having a structure selected from (a), (b) and (c).

[0100] In various embodiments: C′-D′-E′ comprises a processed active peptide depicted in FIG. 21, wherein one or more Asn is optionally replaced by a group having a structure selected from (a), (b) and (c); D′ comprises a polypeptide fragment of a polypeptide depicted in FIG. 21, wherein the polypeptide fragment activates the GC-C receptor; the polypeptide fragment comprises an active core sequence depicted in FIG. 21, wherein one or more Asn is optionally replaced by a group having a structure selected from (a), (b) and (c); D′ comprises a sequence depicted in any of FIGS. 11, 13, 18, 19 and 20; D′ comprises a sequence depicted in any of FIGS. 11, 13, 18, 19 and 20, wherein one or more Asn is optionally replaced by a group having a structure selected from (a), (b) and (c); the polypeptide comprises an amino acid sequence selected from:

| | |
|---|---|
| Gln Ser Ser Asn Tyr Cys Cys Glu Tyr Cys Cys Asn Pro Ala Cys Thr Gly Cys | (SEQ ID NO: ---) |
| Tyr | |
| Asn Thr Ser Asn Tyr Cys Cys Glu Tyr Cys Cys Asn Pro Ala Cys Thr Gly Cys | (SEQ ID NO: ---) |
| Tyr | |
| Asn Leu Ser Asn Tyr Cys Cys Glu Tyr Cys Cys Asn Pro Ala Cys Thr Gly Cys | (SEQ ID NO: ---) |
| Tyr | |
| Asn Ile Ser Asn Tyr Cys Cys Glu Tyr Cys Cys Asn Pro Ala Cys Thr Gly Cys | (SEQ ID NO: ---) |
| Tyr | |
| Asn Ser Ser Gln Tyr Cys Cys Glu Tyr Cys Cys Asn Pro Ala Cys Thr Gly Cys | (SEQ ID NO: ---) |
| Tyr | |
| Ser Ser Asn Tyr Cys Cys Glu Tyr Cys Cys Asn Pro Ala Cys Thr Gly Cys Tyr | (SEQ ID NO: ---) |
| Gln Ser Ser Gln Tyr Cys Cys Glu Tyr Cys Cys Asn Pro Ala Cys Thr Gly Cys | (SEQ ID NO: ---) |
| Tyr | |
| Ser Ser Gln Tyr Cys Cys Glu Tyr Cys Cys Asn Pro Ala Cys Thr Gly Cys Tyr. | (SEQ ID NO: ---) |
| Asn Ser Ser Asn Tyr Cys Cys Glu Ala Cys Cys Asn Pro Ala Cys Thr Gly Cys | (SEQ ID NO: ) |
| Tyr | |
| Asn Ser Ser Asn Tyr Cys Cys Glu Arg Cys Cys Asn Pro Ala Cys Thr Gly Cys | (SEQ ID NO: ) |
| Tyr | |
| Asn Ser Ser Asn Tyr Cys Cys Glu Asn Cys Cys Asn Pro Ala Cys Thr Gly Cys | (SEQ ID NO: ) |
| Tyr | |
| Asn Ser Ser Asn Tyr Cys Cys Glu Asp Cys Cys Asn Pro Ala Cys Thr Gly Cys | (SEQ ID NO: ) |
| Tyr | |
| Asn Ser Ser Asn Tyr Cys Cys Glu Cys Cys Cys Asn Pro Ala Cys Thr Gly Cys | (SEQ ID NO: ) |
| Tyr | |
| Asn Ser Ser Asn Tyr Cys Cys Glu Gln Cys Cys Asn Pro Ala Cys Thr Gly Cys | (SEQ ID NO: ) |
| Tyr | |
| Asn Ser Ser Asn Tyr Cys Cys Glu Glu Cys Cys Asn Pro Ala Cys Thr Gly Cys | (SEQ ID NO: ) |
| Tyr | |
| Asn Ser Ser Asn Tyr Cys Cys Glu Gly Cys Cys Asn Pro Ala Cys Thr Gly Cys | (SEQ ID NO: ) |
| Tyr | |
| Asn Ser Ser Asn Tyr Cys Cys Glu His Cys Cys Asn Pro Ala Cys Thr Gly Cys | (SEQ ID NO: ) |
| Tyr | |
| Asn Ser Ser Asn Tyr Cys Cys Glu Ile Cys Cys Asn Pro Ala Cys Thr Gly Cys | (SEQ ID NO: ) |
| Tyr | |
| Asn Ser Ser Asn Tyr Cys Cys Glu Lys Cys Cys Asn Pro Ala Cys Thr Gly Cys | (SEQ ID NO: ) |
| Tyr | |
| Asn Ser Ser Asn Tyr Cys Cys Glu Met Cys Cys Asn Pro Ala Cys Thr Gly Cys | (SEQ ID NO: ) |
| Tyr | |
| Asn Ser Ser Asn Tyr Cys Cys Glu Phe Cys Cys Asn Pro Ala Cys Thr Gly Cys | (SEQ ID NO: ) |
| Tyr | |
| Asn Ser Ser Asn Tyr Cys Cys Glu Pro Cys Cys Asn Pro Ala Cys Thr Gly Cys | (SEQ ID NO: ) |
| Tyr | |
| Asn Ser Ser Asn Tyr Cys Cys Glu Ser Cys Cys Asn Pro Ala Cys Thr Gly Cys | (SEQ ID NO: ) |
| Tyr | |
| Asn Ser Ser Asn Tyr Cys Cys Glu Thr Cys Cys Asn Pro Ala Cys Thr Gly Cys | (SEQ ID NO: ) |
| Tyr | |
| Asn Ser Ser Asn Tyr Cys Cys Glu Trp Cys Cys Asn Pro Ala Cys Thr Gly Cys | (SEQ ID NO: ) |
| Tyr | |
| Asn Ser Ser Asn Tyr Cys Cys Glu Val Cys Cys Asn Pro Ala Cys Thr Gly Cys | (SEQ ID NO: ) |
| Tyr | |
| Cys Cys Glu Ala Cys Cys Asn Pro Ala Cys Thr Gly Cys Tyr | (SEQ ID NO: ) |
| Cys Cys Glu Arg Cys Cys Asn Pro Ala Cys Thr Gly Cys Tyr | (SEQ ID NO: ) |
| Cys Cys Glu Asn Cys Cys Asn Pro Ala Cys Thr Gly Cys Tyr | (SEQ ID NO: ) |
| Cys Cys Glu Asp Cys Cys Asn Pro Ala Cys Thr Gly Cys Tyr | (SEQ ID NO: ) |
| Cys Cys Glu Cys Cys Cys Asn Pro Ala Cys Thr Gly Cys Tyr | (SEQ ID NO: ) |
| Cys Cys Glu Gln Cys Cys Asn Pro Ala Cys Thr Gly Cys Tyr | (SEQ ID NO: ) |
| Cys Cys Glu Glu Cys Cys Asn Pro Ala Cys Thr Gly Cys Tyr | (SEQ ID NO: ) |
| Cys Cys Glu Gly Cys Cys Asn Pro Ala Cys Thr Gly Cys Tyr | (SEQ ID NO: ) |
| Cys Cys Glu His Cys Cys Asn Pro Ala Cys Thr Gly Cys Tyr | (SEQ ID NO: ) |
| Cys Cys Glu Ile Cys Cys Asn Pro Ala Cys Thr Gly Cys Tyr | (SEQ ID NO: ) |
| Cys Cys Glu Leu Cys Cys Asn Pro Ala Cys Thr Gly Cys Tyr | (SEQ ID NO: ) |
| Cys Cys Glu Lys Cys Cys Asn Pro Ala Cys Thr Gly Cys Tyr | (SEQ ID NO: ) |
| Cys Cys Glu Met Cys Cys Asn Pro Ala Cys Thr Gly Cys Tyr | (SEQ ID NO: ) |
| Cys Cys Glu Phe Cys Cys Asn Pro Ala Cys Thr Gly Cys Tyr | (SEQ ID NO: ) |
| Cys Cys Glu Pro Cys Cys Asn Pro Ala Cys Thr Gly Cys Tyr | (SEQ ID NO: ) |
| Cys Cys Glu Ser Cys Cys Asn Pro Ala Cys Thr Gly Cys Tyr | (SEQ ID NO: ) |
| Cys Cys Glu Thr Cys Cys Asn Pro Ala Cys Thr Gly Cys Tyr | (SEQ ID NO: ) |
| Cys Cys Glu Trp Cys Cys Asn Pro Ala Cys Thr Gly Cys Tyr | (SEQ ID NO: ) |
| Cys Cys Glu Val Cys Cys Asn Pro Ala Cys Thr Gly Cys Tyr | (SEQ ID NO: ) |
| Cys Cys Glu Tyr Cys Cys Asn Pro Ala Cys Thr Gly Cys Tyr | (SEQ ID NO: ) |
| Cys Cys Glu Tyr Cys Cys Asn Pro Ala Cys Thr Gly Cys | (SEQ ID NO: ) |
| Cys Cys Glu Ala Cys Cys Asn Pro Ala Cys Thr Gly Cys | (SEQ ID NO: ) |
| Cys Cys Glu Arg Cys Cys Asn Pro Ala Cys Thr Gly Cys | (SEQ ID NO: ) |
| Cys Cys Glu Asn Cys Cys Asn Pro Ala Cys Thr Gly Cys | (SEQ ID NO: ) |
| Cys Cys Glu Asp Cys Cys Asn Pro Ala Cys Thr Gly Cys | (SEQ ID NO: ) |
| Cys Cys Glu Cys Cys Cys Asn Pro Ala Cys Thr Gly Cys | (SEQ ID NO: ) |
| Cys Cys Glu Gln Cys Cys Asn Pro Ala Cys Thr Gly Cys | (SEQ ID NO: ) |
| Cys Cys Glu Glu Cys Cys Asn Pro Ala Cys Thr Gly Cys | (SEQ ID NO: ) |
| Cys Cys Glu Gly Cys Cys Asn Pro Ala Cys Thr Gly Cys | (SEQ ID NO: ) |
| Cys Cys Glu His Cys Cys Asn Pro Ala Cys Thr Gly Cys | (SEQ ID NO: ) |
| Cys Cys Glu Ile Cys Cys Asn Pro Ala Cys Thr Gly Cys | (SEQ ID NO: ) |
| Cys Cys Glu Leu Cys Cys Asn Pro Ala Cys Thr Gly Cys | (SEQ ID NO: ) |
| Cys Cys Glu Lys Cys Cys Asn Pro Ala Cys Thr Gly Cys | (SEQ ID NO: ) |
| Cys Cys Glu Met Cys Cys Asn Pro Ala Cys Thr Gly Cys | (SEQ ID NO: ) |
| Cys Cys Glu Phe Cys Cys Asn Pro Ala Cys Thr Gly Cys | (SEQ ID NO: ) |
| Cys Cys Glu Pro Cys Cys Asn Pro Ala Cys Thr Gly Cys | (SEQ ID NO: ) |
| Cys Cys Glu Ser Cys Cys Asn Pro Ala Cys Thr Gly Cys | (SEQ ID NO: ) |
| Cys Cys Glu Thr Cys Cys Asn Pro Ala Cys Thr Gly Cys; | (SEQ ID NO: ) |
| Cys Cys Glu Trp Cys Cys Asn Pro Ala Cys Thr Gly Cys | (SEQ ID NO: ) |
| Cys Cys Glu Val Cys Cys Asn Pro Ala Cys Thr Gly Cys. | (SEQ ID NO:) |
| Cys Cys Glu Leu Cys Cys Ala Pro Ala Cys Thr Gly Cys Tyr | |
| Cys Cys Glu Leu Cys Cys Val Pro Ala Cys Thr Gly Cys Tyr | |
| Cys Cys Glu Leu Cys Cys Leu Pro Ala Cys Thr Gly Cys Tyr | |
| Cys Cys Glu Leu Cys Cys Ile Pro Ala Cys Thr Gly Cys Tyr | |
| Cys Cys Glu Leu Cys Cys Pro Pro Ala Cys Thr Gly Cys Tyr | |
| Cys Cys Glu Leu Cys Cys Met Pro Ala Cys Thr Gly Cys Tyr | |
| Cys Cys Glu Leu Cys Cys Phe Pro Ala Cys Thr Gly Cys Tyr | |
| Cys Cys Glu Leu Cys Cys Trp Pro Ala Cys Thr Gly Cys Tyr | |
| Cys Cys Glu Leu Cys Cys Gly Pro Ala Cys Thr Gly Cys Tyr | |
| Cys Cys Glu Leu Cys Cys Ser Pro Ala Cys Thr Gly Cys Tyr | |
| Cys Cys Glu Leu Cys Cys Thr Pro Ala Cys Thr Gly Cys Tyr | |
| Cys Cys Glu Leu Cys Cys Cys Pro Ala Cys Thr Gly Cys Tyr | |
| Cys Cys Glu Leu Cys Cys Gln Pro Ala Cys Thr Gly Cys Tyr | |
| Cys Cys Glu Leu Cys Cys Tyr Pro Ala Cys Thr Gly Cys Tyr | |
| Cys Cys Glu Leu Cys Cys Asp Pro Ala Cys Thr Gly Cys Tyr | |
| Cys Cys Glu Leu Cys Cys Glu Pro Ala Cys Thr Gly Cys Tyr | |
| Cys Cys Glu Leu Cys Cys Lys Pro Ala Cys Thr Gly Cys Tyr | |
| Cys Cys Glu Leu Cys Cys Arg Pro Ala Cys Thr Gly Cys Tyr | |
| Cys Cys Glu Leu Cys Cys His Pro Ala Cys Thr Gly Cys Tyr | |
| Cys Cys Glu Tyr Cys Cys Ala Pro Ala Cys Thr Gly Cys Tyr | |
| Cys Cys Glu Tyr Cys Cys Val Pro Ala Cys Thr Gly Cys Tyr | |
| Cys Cys Glu Tyr Cys Cys Leu Pro Ala Cys Thr Gly Cys Tyr | |
| Cys Cys Glu Tyr Cys Cys Ile Pro Ala Cys Thr Gly Cys Tyr | |
| Cys Cys Glu Tyr Cys Cys Pro Pro Ala Cys Thr Gly Cys Tyr | |
| Cys Cys Glu Tyr Cys Cys Met Pro Ala Cys Thr Gly Cys Tyr | |
| Cys Cys Glu Tyr Cys Cys Phe Pro Ala Cys Thr Gly Cys Tyr | |
| Cys Cys Glu Tyr Cys Cys Trp Pro Ala Cys Thr Gly Cys Tyr | |
| Cys Cys Glu Tyr Cys Cys Gly Pro Ala Cys Thr Gly Cys Tyr | |
| Cys Cys Glu Tyr Cys Cys Ser Pro Ala Cys Thr Gly Cys Tyr | |
| Cys Cys Glu Tyr Cys Cys Thr Pro Ala Cys Thr Gly Cys Tyr | |
| Cys Cys Glu Tyr Cys Cys Cys Pro Ala Cys Thr Gly Cys Tyr | |
| Cys Cys Glu Tyr Cys Cys Gln Pro Ala Cys Thr Gly Cys Tyr | |
| Cys Cys Glu Tyr Cys Cys Tyr Pro Ala Cys Thr Gly Cys Tyr | |
| Cys Cys Glu Tyr Cys Cys Asp Pro Ala Cys Thr Gly Cys Tyr | |
| Cys Cys Glu Tyr Cys Cys Glu Pro Ala Cys Thr Gly Cys Tyr | |
| Cys Cys Glu Tyr Cys Cys Lys Pro Ala Cys Thr Gly Cys Tyr | |
| Cys Cys Glu Tyr Cys Cys Arg Pro Ala Cys Thr Gly Cys Tyr | |
| Cys Cys Glu Tyr Cys Cys His Pro Ala Cys Thr Gly Cys Tyr | |
| Cys Cys Glu Leu Cys Cys Ala Pro Ala Cys Thr Gly Cys | |
| Cys Cys Glu Leu Cys Cys Val Pro Ala Cys Thr Gly Cys | |
| Cys Cys Glu Leu Cys Cys Leu Pro Ala Cys Thr Gly Cys | |
| Cys Cys Glu Leu Cys Cys Ile Pro Ala Cys Thr Gly Cys | |
| Cys Cys Glu Leu Cys Cys Pro Pro Ala Cys Thr Gly Cys | |
| Cys Cys Glu Leu Cys Cys Met Pro Ala Cys Thr Gly Cys | |
| Cys Cys Glu Leu Cys Cys Phe Pro Ala Cys Thr Gly Cys | |
| Cys Cys Glu Leu Cys Cys Trp Pro Ala Cys Thr Gly Cys | |
| Cys Cys Glu Leu Cys Cys Gly Pro Ala Cys Thr Gly Cys | |
| Cys Cys Glu Leu Cys Cys Ser Pro Ala Cys Thr Gly Cys | |
| Cys Cys Glu Leu Cys Cys Thr Pro Ala Cys Thr Gly Cys | |
| Cys Cys Glu Leu Cys Cys Cys Pro Ala Cys Thr Gly Cys | |
| Cys Cys Glu Leu Cys Cys Gln Pro Ala Cys Thr Gly Cys | |
| Cys Cys Glu Leu Cys Cys Tyr Pro Ala Cys Thr Gly Cys | |
| Cys Cys Glu Leu Cys Cys Asp Pro Ala Cys Thr Gly Cys | |
| Cys Cys Glu Leu Cys Cys Glu Pro Ala Cys Thr Gly Cys | |
| Cys Cys Glu Leu Cys Cys Lys Pro Ala Cys Thr Gly Cys | |
| Cys Cys Glu Leu Cys Cys Arg Pro Ala Cys Thr Gly Cys | |
| Cys Cys Glu Leu Cys Cys His Pro Ala Cys Thr Gly Cys | |
| Cys Cys Glu Tyr Cys Cys Ala Pro Ala Cys Thr Gly Cys | |
| Cys Cys Glu Tyr Cys Cys Val Pro Ala Cys Thr Gly Cys | |
| Cys Cys Glu Tyr Cys Cys Leu Pro Ala Cys Thr Gly Cys | |
| Cys Cys Glu Tyr Cys Cys Ile Pro Ala Cys Thr Gly Cys | |
| Cys Cys Glu Tyr Cys Cys Pro Pro Ala Cys Thr Gly Cys | |
| Cys Cys Glu Tyr Cys Cys Met Pro Ala Cys Thr Gly Cys | |
| Cys Cys Glu Tyr Cys Cys Phe Pro Ala Cys Thr Gly Cys | |
| Cys Cys Glu Tyr Cys Cys Trp Pro Ala Cys Thr Gly Cys | |
| Cys Cys Glu Tyr Cys Cys Gly Pro Ala Cys Thr Gly Cys | |
| Cys Cys Glu Tyr Cys Cys Ser Pro Ala Cys Thr Gly Cys | |
| Cys Cys Glu Tyr Cys Cys Thr Pro Ala Cys Thr Gly Cys | |
| Cys Cys Glu Tyr Cys Cys Cys Pro Ala Cys Thr Gly Cys | |
| Cys Cys Glu Tyr Cys Cys Gln Pro Ala Cys Thr Gly Cys | |
| Cys Cys Glu Tyr Cys Cys Tyr Pro Ala Cys Thr Gly Cys | |
| Cys Cys Glu Tyr Cys Cys Asp Pro Ala Cys Thr Gly Cys | |
| Cys Cys Glu Tyr Cys Cys Glu Pro Ala Cys Thr Gly Cys | |
| Cys Cys Glu Tyr Cys Cys Lys Pro Ala Cys Thr Gly Cys | |
| Cys Cys Glu Tyr Cys Cys Arg Pro Ala Cys Thr Gly Cys | |
| Cys Cys Glu Tyr Cys Cys His Pro Ala Cys Thr Gly Cys | |
| Cys Cys Glu Leu Cys Cys Asn Pro Thr Cys Thr Gly Cys Tyr | |
| Cys Cys Glu Tyr Cys Cys Asn Pro Thr Cys Thr Gly Cys Tyr | |
| Cys Cys Glu Leu Cys Cys Asn Pro Thr Cys Thr Gly Cys | |
| Cys Cys Glu Tyr Cys Cys Asn Pro Thr Cys Thr Gly Cys | |
| Cys Cys Glu Phe Cys Cys Asn Pro Thr Cys Thr Gly Cys Tyr | |
| Cys Cys Glu Phe Cys Cys Asn Pro Thr Cys Thr Gly Cys | |
| Cys Cys Glu Trp Cys Cys Asn Pro Thr Cys Thr Gly Cys Tyr | |
| Cys Cys Glu Trp Cys Cys Asn Pro Thr Cys Thr Gly Cys | |
| Cys Cys Glu Leu Cys Cys Asn Gly Ala Cys Thr Gly Cys Tyr | |
| Cys Cys Glu Tyr Cys Cys Asn Gly Ala Cys Thr Gly Cys Tyr | |
| Cys Cys Glu Leu Cys Cys Asn Gly Ala Cys Thr Gly Cys | |
| Cys Cys Glu Tyr Cys Cys Asn Gly Ala Cys Thr Gly Cys | |
| Cys Cys Glu Phe Cys Cys Asn Gly Ala Cys Thr Gly Cys Tyr | |
| Cys Cys Glu Phe Cys Cys Asn Gly Ala Cys Thr Gly Cys | |
| Cys Cys Glu Trp Cys Cys Asn Gly Ala Cys Thr Gly Cys Tyr | |
| Cys Cys Glu Trp Cys Cys Asn Gly Ala Cys Thr Gly Cys | |
| Cys Cys Glu Leu Cys Cys Asn Pro Ala Cys Val Gly Cys Tyr | |
| Cys Cys Glu Tyr Cys Cys Asn Pro Ala Cys Val Gly Cys Tyr | |
| Cys Cys Glu Leu Cys Cys Asn Pro Ala Cys Val Gly Cys | |
| Cys Cys Glu Tyr Cys Cys Asn Pro Ala Cys Val Gly Cys | |
| Cys Cys Glu Phe Cys Cys Asn Pro Ala Cys Val Gly Cys Tyr | |
| Cys Cys Glu Phe Cys Cys Asn Pro Ala Cys Val Gly Cys | |
| Cys Cys Glu Trp Cys Cys Asn Pro Ala Cys Val Gly Cys Tyr | |
| Cys Cys Glu Trp Cys Cys Asn Pro Ala Cys Val Gly Cys | |
| Cys Cys Glu Leu Cys Cys Asn Pro Ala Cys Gly Gly Cys Tyr | |
| Cys Cys Glu Tyr Cys Cys Asn Pro Ala Cys Gly Gly Cys Tyr | |
| Cys Cys Glu Leu Cys Cys Asn Pro Ala Cys Gly Gly Cys | |
| Cys Cys Glu Tyr Cys Cys Asn Pro Ala Cys Gly Gly Cys | |
| Cys Cys Glu Phe Cys Cys Asn Pro Ala Cys Gly Gly Cys Tyr | |
| Cys Cys Glu Phe Cys Cys Asn Pro Ala Cys Gly Gly Cys | |
| Cys Cys Glu Trp Cys Cys Asn Pro Ala Cys Gly Gly Cys Tyr | |
| Cys Cys Glu Trp Cys Cys Asn Pro Ala Cys Gly Gly Cys | |
| Cys Cys Glu Leu Cys Cys Asn Pro Ala Cys Thr Ala Cys Tyr | |
| Cys Cys Glu Tyr Cys Cys Asn Pro Ala Cys Thr Ala Cys Tyr | |
| Cys Cys Glu Leu Cys Cys Asn Pro Ala Cys Thr Ala Cys | |
| Cys Cys Glu Tyr Cys Cys Asn Pro Ala Cys Thr Ala Cys | |
| Cys Cys Glu Trp Cys Cys Asn Pro Ala Cys Thr Ala Cys Tyr | |
| Cys Cys Glu Trp Cys Cys Asn Pro Ala Cys Thr Ala Cys | |
| Cys Cys Glu Phe Cys Cys Asn Pro Ala Cys Thr Ala Cys Tyr | |
| Cys Cys Glu Phe Cys Cys Asn Pro Ala Cys Thr Ala Cys | |
| Cys Cys Glu Leu Cys Cys Asn Pro Ala Cys Thr Gly Cys Ala | |
| Cys Cys Glu Leu Cys Cys Asn Pro Ala Cys Thr Gly Cys Val | |
| Cys Cys Glu Leu Cys Cys Asn Pro Ala Cys Thr Gly Cys Leu | |
| Cys Cys Glu Leu Cys Cys Asn Pro Ala Cys Thr Gly Cys Ile | |
| Cys Cys Glu Leu Cys Cys Asn Pro Ala Cys Thr Gly Cys Pro | |
| Cys Cys Glu Leu Cys Cys Asn Pro Ala Cys Thr Gly Cys Met | |
| Cys Cys Glu Leu Cys Cys Asn Pro Ala Cys Thr Gly Cys Phe | |
| Cys Cys Glu Leu Cys Cys Asn Pro Ala Cys Thr Gly Cys Trp | |
| Cys Cys Glu Leu Cys Cys Asn Pro Ala Cys Thr Gly Cys Gly | |
| Cys Cys Glu Leu Cys Cys Asn Pro Ala Cys Thr Gly Cys Ser | |
| Cys Cys Glu Leu Cys Cys Asn Pro Ala Cys Thr Gly Cys Thr | |
| Cys Cys Glu Leu Cys Cys Asn Pro Ala Cys Thr Gly Cys Cys | |
| Cys Cys Glu Leu Cys Cys Asn Pro Ala Cys Thr Gly Cys Asn | |
| Cys Cys Glu Leu Cys Cys Asn Pro Ala Cys Thr Gly Cys Gln | |
| Cys Cys Glu Leu Cys Cys Asn Pro Ala Cys Thr Gly Cys Asp | |
| Cys Cys Glu Leu Cys Cys Asn Pro Ala Cys Thr Gly Cys Glu | |
| Cys Cys Glu Leu Cys Cys Asn Pro Ala Cys Thr Gly Cys Lys | |
| Cys Cys Glu Leu Cys Cys Asn Pro Ala Cys Thr Gly Cys Arg | |
| Cys Cys Glu Leu Cys Cys Asn Pro Ala Cys Thr Gly Cys His | |
| Cys Cys Glu Tyr Cys Cys Asn Pro Ala Cys Thr Gly Cys Ala | |
| Cys Cys Glu Tyr Cys Cys Asn Pro Ala Cys Thr Gly Cys Val | |
| Cys Cys Glu Tyr Cys Cys Asn Pro Ala Cys Thr Gly Cys Leu | |
| Cys Cys Glu Tyr Cys Cys Asn Pro Ala Cys Thr Gly Cys Ile | |
| Cys Cys Glu Tyr Cys Cys Asn Pro Ala Cys Thr Gly Cys Pro | |
| Cys Cys Glu Tyr Cys Cys Asn Pro Ala Cys Thr Gly Cys Met | |
| Cys Cys Glu Tyr Cys Cys Asn Pro Ala Cys Thr Gly Cys Phe | |
| Cys Cys Glu Tyr Cys Cys Asn Pro Ala Cys Thr Gly Cys Trp | |
| Cys Cys Glu Tyr Cys Cys Asn Pro Ala Cys Thr Gly Cys Gly | |
| Cys Cys Glu Tyr Cys Cys Asn Pro Ala Cys Thr Gly Cys Ser | |
| Cys Cys Glu Tyr Cys Cys Asn Pro Ala Cys Thr Gly Cys Thr | |
| Cys Cys Glu Tyr Cys Cys Asn Pro Ala Cys Thr Gly Cys Cys | |
| Cys Cys Glu Tyr Cys Cys Asn Pro Ala Cys Thr Gly Cys Asn | |
| Cys Cys Glu Tyr Cys Cys Asn Pro Ala Cys Thr Gly Cys Gln | |
| Cys Cys Glu Tyr Cys Cys Asn Pro Ala Cys Thr Gly Cys Asp | |
| Cys Cys Glu Tyr Cys Cys Asn Pro Ala Cys Thr Gly Cys Glu | |
| Cys Cys Glu Tyr Cys Cys Asn Pro Ala Cys Thr Gly Cys Lys | |
| Cys Cys Glu Tyr Cys Cys Asn Pro Ala Cys Thr Gly Cys Arg | |
| Cys Cys Glu Tyr Cys Cys Asn Pro Ala Cys Thr Gly Cys His | |
| Cys Cys Ala Leu Cys Cys Asn Pro Ala Cys Thr Gly Cys Tyr | |
| Cys Cys Val Leu Cys Cys Asn Pro Ala Cys Thr Gly Cys Tyr | |
| Cys Cys Leu Leu Cys Cys Asn Pro Ala Cys Thr Gly Cys Tyr | |
| Cys Cys Ile Leu Cys Cys Asn Pro Ala Cys Thr Gly Cys Tyr | |
| Cys Cys Met Leu Cys Cys Asn Pro Ala Cys Thr Gly Cys Tyr | |
| Cys Cys Phe Leu Cys Cys Asn Pro Ala Cys Thr Gly Cys Tyr | |
| Cys Cys Trp Leu Cys Cys Asn Pro Ala Cys Thr Gly Cys Tyr | |
| Cys Cys Gly Leu Cys Cys Asn Pro Ala Cys Thr Gly Cys Tyr | |
| Cys Cys Ser Leu Cys Cys Asn Pro Ala Cys Thr Gly Cys Tyr | |
| Cys Cys Thr Leu Cys Cys Asn Pro Ala Cys Thr Gly Cys Tyr | |
| Cys Cys Cys Leu Cys Cys Asn Pro Ala Cys Thr Gly Cys Tyr | |
| Cys Cys Asn Leu Cys Cys Asn Pro Ala Cys Thr Gly Cys Tyr | |
| Cys Cys Gln Leu Cys Cys Asn Pro Ala Cys Thr Gly Cys Tyr | |
| Cys Cys Tyr Leu Cys Cys Asn Pro Ala Cys Thr Gly Cys Tyr | |
| Cys Cys Asp Leu Cys Cys Asn Pro Ala Cys Thr Gly Cys Tyr | |
| Cys Cys Lys Leu Cys Cys Asn Pro Ala Cys Thr Gly Cys Tyr | |
| Cys Cys Arg Leu Cys Cys Asn Pro Ala Cys Thr Gly Cys Tyr | |
| Cys Cys His Leu Cys Cys Asn Pro Ala Cys Thr Gly Cys Tyr | |
| Cys Cys Ala Leu Cys Cys Asn Pro Ala Cys Thr Gly Cys | |
| Cys Cys Val Leu Cys Cys Asn Pro Ala Cys Thr Gly Cys | |
| Cys Cys Leu Leu Cys Cys Asn Pro Ala Cys Thr Gly Cys | |
| Cys Cys Ile Leu Cys Cys Asn Pro Ala Cys Thr Gly Cys | |
| Cys Cys Met Leu Cys Cys Asn Pro Ala Cys Thr Gly Cys | |
| Cys Cys Phe Leu Cys Cys Asn Pro Ala Cys Thr Gly Cys | |
| Cys Cys Trp Leu Cys Cys Asn Pro Ala Cys Thr Gly Cys | |
| Cys Cys Gly Leu Cys Cys Asn Pro Ala Cys Thr Gly Cys | |
| Cys Cys Ser Leu Cys Cys Asn Pro Ala Cys Thr Gly Cys | |
| Cys Cys Thr Leu Cys Cys Asn Pro Ala Cys Thr Gly Cys | |
| Cys Cys Cys Leu Cys Cys Asn Pro Ala Cys Thr Gly Cys | |
| Cys Cys Asn Leu Cys Cys Asn Pro Ala Cys Thr Gly Cys | |
| Cys Cys Gln Leu Cys Cys Asn Pro Ala Cys Thr Gly Cys | |
| Cys Cys Tyr Leu Cys Cys Asn Pro Ala Cys Thr Gly Cys | |
| Cys Cys Asp Leu Cys Cys Asn Pro Ala Cys Thr Gly Cys | |
| Cys Cys Lys Leu Cys Cys Asn Pro Ala Cys Thr Gly Cys | |
| Cys Cys Arg Leu Cys Cys Asn Pro Ala Cys Thr Gly Cys | |
| Cys Cys His Leu Cys Cys Asn Pro Ala Cys Thr Gly Cys | |
| Cys Cys Ala Tyr Cys Cys Asn Pro Ala Cys Thr Gly Cys Tyr | |
| Cys Cys Val Tyr Cys Cys Asn Pro Ala Cys Thr Gly Cys Tyr | |
| Cys Cys Leu Tyr Cys Cys Asn Pro Ala Cys Thr Gly Cys Tyr | |
| Cys Cys Ile Tyr Cys Cys Asn Pro Ala Cys Thr Gly Cys Tyr | |
| Cys Cys Met Tyr Cys Cys Asn Pro Ala Cys Thr Gly Cys Tyr | |
| Cys Cys Phe Tyr Cys Cys Asn Pro Ala Cys Thr Gly Cys Tyr | |
| Cys Cys Trp Tyr Cys Cys Asn Pro Ala Cys Thr Gly Cys Tyr | |
| Cys Cys Gly Tyr Cys Cys Asn Pro Ala Cys Thr Gly Cys Tyr | |
| Cys Cys Ser Tyr Cys Cys Asn Pro Ala Cys Thr Gly Cys Tyr | |
| Cys Cys Thr Tyr Cys Cys Asn Pro Ala Cys Thr Gly Cys Tyr | |
| Cys Cys Cys Tyr Cys Cys Asn Pro Ala Cys Thr Gly Cys Tyr | |
| Cys Cys Asn Tyr Cys Cys Asn Pro Ala Cys Thr Gly Cys Tyr | |
| Cys Cys Gln Tyr Cys Cys Asn Pro Ala Cys Thr Gly Cys Tyr | |
| Cys Cys Tyr Tyr Cys Cys Asn Pro Ala Cys Thr Gly Cys Tyr | |
| Cys Cys Asp Tyr Cys Cys Asn Pro Ala Cys Thr Gly Cys Tyr | |
| Cys Cys Lys Tyr Cys Cys Asn Pro Ala Cys Thr Gly Cys Tyr | |
| Cys Cys Arg Tyr Cys Cys Asn Pro Ala Cys Thr Gly Cys Tyr | |
| Cys Cys His Tyr Cys Cys Asn Pro Ala Cys Thr Gly Cys Tyr | |
| Cys Cys Ala Tyr Cys Cys Asn Pro Ala Cys Thr Gly Cys | |
| Cys Cys Val Tyr Cys Cys Asn Pro Ala Cys Thr Gly Cys | |
| Cys Cys Leu Tyr Cys Cys Asn Pro Ala Cys Thr Gly Cys | |
| Cys Cys Ile Tyr Cys Cys Asn Pro Ala Cys Thr Gly Cys | |
| Cys Cys Met Tyr Cys Cys Asn Pro Ala Cys Thr Gly Cys | |
| Cys Cys Phe Tyr Cys Cys Asn Pro Ala Cys Thr Gly Cys | |
| Cys Cys Trp Tyr Cys Cys Asn Pro Ala Cys Thr Gly Cys | |
| Cys Cys Gly Tyr Cys Cys Asn Pro Ala Cys Thr Gly Cys | |
| Cys Cys Ser Tyr Cys Cys Asn Pro Ala Cys Thr Gly Cys | |
| Cys Cys Thr Tyr Cys Cys Asn Pro Ala Cys Thr Gly Cys | |
| Cys Cys Cys Tyr Cys Cys Asn Pro Ala Cys Thr Gly Cys | |
| Cys Cys Asn Tyr Cys Cys Asn Pro Ala Cys Thr Gly Cys | |
| Cys Cys Gln Tyr Cys Cys Asn Pro Ala Cys Thr Gly Cys | |
| Cys Cys Tyr Tyr Cys Cys Asn Pro Ala Cys Thr Gly Cys | |
| Cys Cys Asp Tyr Cys Cys Asn Pro Ala Cys Thr Gly Cys | |
| Cys Cys Lys Tyr Cys Cys Asn Pro Ala Cys Thr Gly Cys | |
| Cys Cys Arg Tyr Cys Cys Asn Pro Ala Cys Thr Gly Cys | |
| Cys Cys His Tyr Cys Cys Asn Pro Ala Cys Thr Gly Cys | |
| Cys Cys Glu Phe Cys Cys Ala Pro Ala Cys Thr Gly Cys Tyr | |
| Cys Cys Glu Phe Cys Cys Val Pro Ala Cys Thr Gly Cys Tyr | |
| Cys Cys Glu Phe Cys Cys Leu Pro Ala Cys Thr Gly Cys Tyr | |
| Cys Cys Glu Phe Cys Cys Ile Pro Ala Cys Thr Gly Cys Tyr | |
| Cys Cys Glu Phe Cys Cys Pro Pro Ala Cys Thr Gly Cys Tyr | |
| Cys Cys Glu Phe Cys Cys Met Pro Ala Cys Thr Gly Cys Tyr | |
| Cys Cys Glu Phe Cys Cys Phe Pro Ala Cys Thr Gly Cys Tyr | |
| Cys Cys Glu Phe Cys Cys Trp Pro Ala Cys Thr Gly Cys Tyr | |
| Cys Cys Glu Phe Cys Cys Gly Pro Ala Cys Thr Gly Cys Tyr | |
| Cys Cys Glu Phe Cys Cys Ser Pro Ala Cys Thr Gly Cys Tyr | |
| Cys Cys Glu Phe Cys Cys Thr Pro Ala Cys Thr Gly Cys Tyr | |
| Cys Cys Glu Phe Cys Cys Cys Pro Ala Cys Thr Gly Cys Tyr | |
| Cys Cys Glu Phe Cys Cys Gln Pro Ala Cys Thr Gly Cys Tyr | |
| Cys Cys Glu Phe Cys Cys Tyr Pro Ala Cys Thr Gly Cys Tyr | |
| Cys Cys Glu Phe Cys Cys Asp Pro Ala Cys Thr Gly Cys Tyr | |
| Cys Cys Glu Phe Cys Cys Glu Pro Ala Cys Thr Gly Cys Tyr | |
| Cys Cys Glu Phe Cys Cys Lys Pro Ala Cys Thr Gly Cys Tyr | |
| Cys Cys Glu Phe Cys Cys Arg Pro Ala Cys Thr Gly Cys Tyr | |
| Cys Cys Glu Phe Cys Cys His Pro Ala Cys Thr Gly Cys Tyr | |
| Cys Cys Glu Phe Cys Cys Ala Pro Ala Cys Thr Gly Cys | |
| Cys Cys Glu Phe Cys Cys Val Pro Ala Cys Thr Gly Cys | |
| Cys Cys Glu Phe Cys Cys Leu Pro Ala Cys Thr Gly Cys | |
| Cys Cys Glu Phe Cys Cys Ile Pro Ala Cys Thr Gly Cys | |
| Cys Cys Glu Phe Cys Cys Pro Pro Ala Cys Thr Gly Cys | |
| Cys Cys Glu Phe Cys Cys Met Pro Ala Cys Thr Gly Cys | |
| Cys Cys Glu Phe Cys Cys Phe Pro Ala Cys Thr Gly Cys | |
| Cys Cys Glu Phe Cys Cys Trp Pro Ala Cys Thr Gly Cys | |
| Cys Cys Glu Phe Cys Cys Gly Pro Ala Cys Thr Gly Cys | |
| Cys Cys Glu Phe Cys Cys Ser Pro Ala Cys Thr Gly Cys | |
| Cys Cys Glu Phe Cys Cys Thr Pro Ala Cys Thr Gly Cys | |
| Cys Cys Glu Phe Cys Cys Cys Pro Ala Cys Thr Gly Cys | |
| Cys Cys Glu Phe Cys Cys Gln Pro Ala Cys Thr Gly Cys | |
| Cys Cys Glu Phe Cys Cys Tyr Pro Ala Cys Thr Gly Cys | |
| Cys Cys Glu Phe Cys Cys Asp Pro Ala Cys Thr Gly Cys | |
| Cys Cys Glu Phe Cys Cys Glu Pro Ala Cys Thr Gly Cys | |
| Cys Cys Glu Phe Cys Cys Lys Pro Ala Cys Thr Gly Cys | |
| Cys Cys Glu Phe Cys Cys Arg Pro Ala Cys Thr Gly Cys | |
| Cys Cys Glu Phe Cys Cys His Pro Ala Cys Thr Gly Cys | |
| Cys Cys Glu Trp Cys Cys Ala Pro Ala Cys Thr Gly Cys Tyr | |
| Cys Cys Glu Trp Cys Cys Val Pro Ala Cys Thr Gly Cys Tyr | |
| Cys Cys Glu Trp Cys Cys Leu Pro Ala Cys Thr Gly Cys Tyr | |
| Cys Cys Glu Trp Cys Cys Ile Pro Ala Cys Thr Gly Cys Tyr | |
| Cys Cys Glu Trp Cys Cys Pro Pro Ala Cys Thr Gly Cys Tyr | |
| Cys Cys Glu Trp Cys Cys Met Pro Ala Cys Thr Gly Cys Tyr | |
| Cys Cys Glu Trp Cys Cys Phe Pro Ala Cys Thr Gly Cys Tyr | |
| Cys Cys Glu Trp Cys Cys Trp Pro Ala Cys Thr Gly Cys Tyr | |
| Cys Cys Glu Trp Cys Cys Gly Pro Ala Cys Thr Gly Cys Tyr | |
| Cys Cys Glu Trp Cys Cys Ser Pro Ala Cys Thr Gly Cys Tyr | |
| Cys Cys Glu Trp Cys Cys Thr Pro Ala Cys Thr Gly Cys Tyr | |
| Cys Cys Glu Trp Cys Cys Cys Pro Ala Cys Thr Gly Cys Tyr | |
| Cys Cys Glu Trp Cys Cys Gln Pro Ala Cys Thr Gly Cys Tyr | |
| Cys Cys Glu Trp Cys Cys Tyr Pro Ala Cys Thr Gly Cys Tyr | |
| Cys Cys Glu Trp Cys Cys Asp Pro Ala Cys Thr Gly Cys Tyr | |
| Cys Cys Glu Trp Cys Cys Glu Pro Ala Cys Thr Gly Cys Tyr | |
| Cys Cys Glu Trp Cys Cys Lys Pro Ala Cys Thr Gly Cys Tyr | |
| Cys Cys Glu Trp Cys Cys Arg Pro Ala Cys Thr Gly Cys Tyr | |
| Cys Cys Glu Trp Cys Cys His Pro Ala Cys Thr Gly Cys Tyr | |
| Cys Cys Glu Trp Cys Cys Ala Pro Ala Cys Thr Gly Cys | |
| Cys Cys Glu Trp Cys Cys Val Pro Ala Cys Thr Gly Cys | |
| Cys Cys Glu Trp Cys Cys Leu Pro Ala Cys Thr Gly Cys | |
| Cys Cys Glu Trp Cys Cys Ile Pro Ala Cys Thr Gly Cys | |
| Cys Cys Glu Trp Cys Cys Pro Pro Ala Cys Thr Gly Cys | |
| Cys Cys Glu Trp Cys Cys Met Pro Ala Cys Thr Gly Cys | |
| Cys Cys Glu Trp Cys Cys Phe Pro Ala Cys Thr Gly Cys | |
| Cys Cys Glu Trp Cys Cys Trp Pro Ala Cys Thr Gly Cys | |
| Cys Cys Glu Trp Cys Cys Gly Pro Ala Cys Thr Gly Cys | |
| Cys Cys Glu Trp Cys Cys Ser Pro Ala Cys Thr Gly Cys | |
| Cys Cys Glu Trp Cys Cys Thr Pro Ala Cys Thr Gly Cys | |
| Cys Cys Glu Trp Cys Cys Cys Pro Ala Cys Thr Gly Cys | |
| Cys Cys Glu Trp Cys Cys Gln Pro Ala Cys Thr Gly Cys | |
| Cys Cys Glu Trp Cys Cys Tyr Pro Ala Cys Thr Gly Cys | |
| Cys Cys Glu Trp Cys Cys Asp Pro Ala Cys Thr Gly Cys | |
| Cys Cys Glu Trp Cys Cys Glu Pro Ala Cys Thr Gly Cys | |
| Cys Cys Glu Trp Cys Cys Lys Pro Ala Cys Thr Gly Cys | |
| Cys Cys Glu Trp Cys Cys Arg Pro Ala Cys Thr Gly Cys | |
| Cys Cys Glu Trp Cys Cys His Pro Ala Cys Thr Gly Cys | |
| Cys Cys Glu Trp Cys Cys Asn Pro Ala Cys Thr Gly Cys Ala | |
| Cys Cys Glu Trp Cys Cys Asn Pro Ala Cys Thr Gly Cys Val | |
| Cys Cys Glu Trp Cys Cys Asn Pro Ala Cys Thr Gly Cys Leu | |
| Cys Cys Glu Trp Cys Cys Asn Pro Ala Cys Thr Gly Cys Ile | |
| Cys Cys Glu Trp Cys Cys Asn Pro Ala Cys Thr Gly Cys Pro | |
| Cys Cys Glu Trp Cys Cys Asn Pro Ala Cys Thr Gly Cys Met | |
| Cys Cys Glu Trp Cys Cys Asn Pro Ala Cys Thr Gly Cys Phe | |
| Cys Cys Glu Trp Cys Cys Asn Pro Ala Cys Thr Gly Cys Trp | |
| Cys Cys Glu Trp Cys Cys Asn Pro Ala Cys Thr Gly Cys Gly | |
| Cys Cys Glu Trp Cys Cys Asn Pro Ala Cys Thr Gly Cys Ser | |
| Cys Cys Glu Trp Cys Cys Asn Pro Ala Cys Thr Gly Cys Thr | |
| Cys Cys Glu Trp Cys Cys Asn Pro Ala Cys Thr Gly Cys Cys | |
| Cys Cys Glu Trp Cys Cys Asn Pro Ala Cys Thr Gly Cys Asn | |
| Cys Cys Glu Trp Cys Cys Asn Pro Ala Cys Thr Gly Cys Gln | |
| Cys Cys Glu Trp Cys Cys Asn Pro Ala Cys Thr Gly Cys Asp | |
| Cys Cys Glu Trp Cys Cys Asn Pro Ala Cys Thr Gly Cys Glu | |
| Cys Cys Glu Trp Cys Cys Asn Pro Ala Cys Thr Gly Cys Lys | |
| Cys Cys Glu Trp Cys Cys Asn Pro Ala Cys Thr Gly Cys Arg | |
| Cys Cys Glu Trp Cys Cys Asn Pro Ala Cys Thr Gly Cys His | |
| Cys Cys Glu Phe Cys Cys Asn Pro Ala Cys Thr Gly Cys Ala | |
| Cys Cys Glu Phe Cys Cys Asn Pro Ala Cys Thr Gly Cys Val | |
| Cys Cys Glu Phe Cys Cys Asn Pro Ala Cys Thr Gly Cys Leu | |
| Cys Cys Glu Phe Cys Cys Asn Pro Ala Cys Thr Gly Cys Ile | |
| Cys Cys Glu Phe Cys Cys Asn Pro Ala Cys Thr Gly Cys Pro | |
| Cys Cys Glu Phe Cys Cys Asn Pro Ala Cys Thr Gly Cys Met | |
| Cys Cys Glu Phe Cys Cys Asn Pro Ala Cys Thr Gly Cys Phe | |
| Cys Cys Glu Phe Cys Cys Asn Pro Ala Cys Thr Gly Cys Trp | |
| Cys Cys Glu Phe Cys Cys Asn Pro Ala Cys Thr Gly Cys Gly | |
| Cys Cys Glu Phe Cys Cys Asn Pro Ala Cys Thr Gly Cys Ser | |
| Cys Cys Glu Phe Cys Cys Asn Pro Ala Cys Thr Gly Cys Thr | |
| Cys Cys Glu Phe Cys Cys Asn Pro Ala Cys Thr Gly Cys Cys | |
| Cys Cys Glu Phe Cys Cys Asn Pro Ala Cys Thr Gly Cys Asn | |
| Cys Cys Glu Phe Cys Cys Asn Pro Ala Cys Thr Gly Cys Gln | |
| Cys Cys Glu Phe Cys Cys Asn Pro Ala Cys Thr Gly Cys Asp | |
| Cys Cys Glu Phe Cys Cys Asn Pro Ala Cys Thr Gly Cys Glu | |
| Cys Cys Glu Phe Cys Cys Asn Pro Ala Cys Thr Gly Cys Lys | |
| Cys Cys Glu Phe Cys Cys Asn Pro Ala Cys Thr Gly Cys Arg | |
| Cys Cys Glu Phe Cys Cys Asn Pro Ala Cys Thr Gly Cys His | |
| Cys Cys Ala Phe Cys Cys Asn Pro Ala Cys Thr Gly Cys Tyr | |
| Cys Cys Val Phe Cys Cys Asn Pro Ala Cys Thr Gly Cys Tyr | |
| Cys Cys Leu Phe Cys Cys Asn Pro Ala Cys Thr Gly Cys Tyr | |
| Cys Cys Ile Phe Cys Cys Asn Pro Ala Cys Thr Gly Cys Tyr | |
| Cys Cys Met Phe Cys Cys Asn Pro Ala Cys Thr Gly Cys Tyr | |
| Cys Cys Phe Phe Cys Cys Asn Pro Ala Cys Thr Gly Cys Tyr | |
| Cys Cys Trp Phe Cys Cys Asn Pro Ala Cys Thr Gly Cys Tyr | |
| Cys Cys Gly Phe Cys Cys Asn Pro Ala Cys Thr Gly Cys Tyr | |
| Cys Cys Ser Phe Cys Cys Asn Pro Ala Cys Thr Gly Cys Tyr | |
| Cys Cys Thr Phe Cys Cys Asn Pro Ala Cys Thr Gly Cys Tyr | |
| Cys Cys Cys Phe Cys Cys Asn Pro Ala Cys Thr Gly Cys Tyr | |
| Cys Cys Asn Phe Cys Cys Asn Pro Ala Cys Thr Gly Cys Tyr | |
| Cys Cys Gln Phe Cys Cys Asn Pro Ala Cys Thr Gly Cys Tyr | |
| Cys Cys Tyr Phe Cys Cys Asn Pro Ala Cys Thr Gly Cys Tyr | |
| Cys Cys Asp Phe Cys Cys Asn Pro Ala Cys Thr Gly Cys Tyr | |
| Cys Cys Lys Phe Cys Cys Asn Pro Ala Cys Thr Gly Cys Tyr | |
| Cys Cys Arg Phe Cys Cys Asn Pro Ala Cys Thr Gly Cys Tyr | |
| Cys Cys His Phe Cys Cys Asn Pro Ala Cys Thr Gly Cys Tyr | |
| Cys Cys Ala Phe Cys Cys Asn Pro Ala Cys Thr Gly Cys | |
| Cys Cys Val Phe Cys Cys Asn Pro Ala Cys Thr Gly Cys | |
| Cys Cys Leu Phe Cys Cys Asn Pro Ala Cys Thr Gly Cys | |
| Cys Cys Ile Phe Cys Cys Asn Pro Ala Cys Thr Gly Cys | |
| Cys Cys Met Phe Cys Cys Asn Pro Ala Cys Thr Gly Cys | |
| Cys Cys Phe Phe Cys Cys Asn Pro Ala Cys Thr Gly Cys | |
| Cys Cys Trp Phe Cys Cys Asn Pro Ala Cys Thr Gly Cys | |
| Cys Cys Gly Phe Cys Cys Asn Pro Ala Cys Thr Gly Cys | |
| Cys Cys Ser Phe Cys Cys Asn Pro Ala Cys Thr Gly Cys | |
| Cys Cys Thr Phe Cys Cys Asn Pro Ala Cys Thr Gly Cys | |
| Cys Cys Cys Phe Cys Cys Asn Pro Ala Cys Thr Gly Cys | |
| Cys Cys Asn Phe Cys Cys Asn Pro Ala Cys Thr Gly Cys | |
| Cys Cys Gln Phe Cys Cys Asn Pro Ala Cys Thr Gly Cys | |
| Cys Cys Tyr Phe Cys Cys Asn Pro Ala Cys Thr Gly Cys | |
| Cys Cys Asp Phe Cys Cys Asn Pro Ala Cys Thr Gly Cys | |
| Cys Cys Lys Phe Cys Cys Asn Pro Ala Cys Thr Gly Cys | |
| Cys Cys Arg Phe Cys Cys Asn Pro Ala Cys Thr Gly Cys | |
| Cys Cys His Phe Cys Cys Asn Pro Ala Cys Thr Gly Cys | |
| Cys Cys Ala Trp Cys Cys Asn Pro Ala Cys Thr Gly Cys Tyr | |
| Cys Cys Val Trp Cys Cys Asn Pro Ala Cys Thr Gly Cys Tyr | |
| Cys Cys Leu Trp Cys Cys Asn Pro Ala Cys Thr Gly Cys Tyr | |
| Cys Cys Ile Trp Cys Cys Asn Pro Ala Cys Thr Gly Cys Tyr | |
| Cys Cys Met Trp Cys Cys Asn Pro Ala Cys Thr Gly Cys Tyr | |
| Cys Cys Phe Trp Cys Cys Asn Pro Ala Cys Thr Gly Cys Tyr | |
| Cys Cys Trp Trp Cys Cys Asn Pro Ala Cys Thr Gly Cys Tyr | |
| Cys Cys Gly Trp Cys Cys Asn Pro Ala Cys Thr Gly Cys Tyr | |
| Cys Cys Ser Trp Cys Cys Asn Pro Ala Cys Thr Gly Cys Tyr | |
| Cys Cys Thr Trp Cys Cys Asn Pro Ala Cys Thr Gly Cys Tyr | |
| Cys Cys Cys Trp Cys Cys Asn Pro Ala Cys Thr Gly Cys Tyr | |
| Cys Cys Asn Trp Cys Cys Asn Pro Ala Cys Thr Gly Cys Tyr | |
| Cys Cys Gln Trp Cys Cys Asn Pro Ala Cys Thr Gly Cys Tyr | |
| Cys Cys Tyr Trp Cys Cys Asn Pro Ala Cys Thr Gly Cys Tyr | |
| Cys Cys Asp Trp Cys Cys Asn Pro Ala Cys Thr Gly Cys Tyr | |
| Cys Cys Lys Trp Cys Cys Asn Pro Ala Cys Thr Gly Cys Tyr | |
| Cys Cys Arg Trp Cys Cys Asn Pro Ala Cys Thr Gly Cys Tyr | |
| Cys Cys His Trp Cys Cys Asn Pro Ala Cys Thr Gly Cys Tyr | |
| Cys Cys Ala Trp Cys Cys Asn Pro Ala Cys Thr Gly Cys | |
| Cys Cys Val Trp Cys Cys Asn Pro Ala Cys Thr Gly Cys | |
| Cys Cys Leu Trp Cys Cys Asn Pro Ala Cys Thr Gly Cys | |
| Cys Cys Ile Trp Cys Cys Asn Pro Ala Cys Thr Gly Cys | |
| Cys Cys Met Trp Cys Cys Asn Pro Ala Cys Thr Gly Cys | |
| Cys Cys Phe Trp Cys Cys Asn Pro Ala Cys Thr Gly Cys | |
| Cys Cys Trp Trp Cys Cys Asn Pro Ala Cys Thr Gly Cys | |
| Cys Cys Gly Trp Cys Cys Asn Pro Ala Cys Thr Gly Cys | |
| Cys Cys Ser Trp Cys Cys Asn Pro Ala Cys Thr Gly Cys | |
| Cys Cys Thr Trp Cys Cys Asn Pro Ala Cys Thr Gly Cys | |
| Cys Cys Cys Trp Cys Cys Asn Pro Ala Cys Thr Gly Cys | |
| Cys Cys Asn Trp Cys Cys Asn Pro Ala Cys Thr Gly Cys | |
| Cys Cys Gln Trp Cys Cys Asn Pro Ala Cys Thr Gly Cys | |
| Cys Cys Tyr Trp Cys Cys Asn Pro Ala Cys Thr Gly Cys | |
| Cys Cys Asp Trp Cys Cys Asn Pro Ala Cys Thr Gly Cys | |
| Cys Cys Lys Trp Cys Cys Asn Pro Ala Cys Thr Gly Cys | |
| Cys Cys Arg Trp Cys Cys Asn Pro Ala Cys Thr Gly Cys | |
| Cys Cys His Trp Cys Cys Asn Pro Ala Cys Thr Gly Cys | |
| Cys Glu Leu Cys Ile Asn Val Ala Cys Thr Gly Cys | |
| Cys Glu Leu Cys Val Asn Val Ala Cys Thr Gly Cys | |
| Cys Ala Glu Leu Cys Cys Asn Pro Ala Cys | |
| Cys Cys Gly Leu Cys Cys Asn Pro Ala Cys Ala Gly Cys | |
| Cys Cys Gly Leu Cys Cys Tyr Pro Ala Cys Ala Gly Cys | |
| Cys Glu Leu Cys Cys Asn Pro Ala Cys Ala Gly Cys | |
| Cys Cys Asp Val Cys Cys Tyr Pro Ala Cys Thr Gly Cys | |
| Cys Cys Glu Leu Cys Cys Asn Pro Ala Cys Ala Gly Cys | |
| Cys Cys Glu Leu Cys Cys Tyr Pro Ala Cys Ala Gly Cys | |
| Cys Cys Glu Leu Cys Cys Asn Pro Ala Cys Thr Gly Cys | |
| Cys Cys Glu Leu Cys Cys Tyr Pro Ala Cys Thr Gly Cys | |
| Cys Cys Glu Leu Cys Cys Asn Pro Gly Cys Thr Gly Cys | |
| Cys Cys Glu Ala Cys Cys Asn Pro Ala Cys Thr Gly Cys | |
| Cys Cys Glu Lys Cys Cys Asn Pro Ala Cys Thr Gly Cys | |
| Cys Cys Glu Leu Cys Cys Asn Pro Ala Cys Thr Ala Cys | |
| Cys Cys Pro Leu Cys Cys Asn Pro Ala Cys Thr Gly Cys | |
| Ala Cys Glu Leu Cys Ala Asn Pro Ala Cys Thr Gly Cys | |
| Cys Cys Glu Leu Ala Cys Asn Pro Ala Cys Thr Gly Ala | |
| Cys Glu Leu Cys Ala Asn Pro Ala Cys Thr Gly Cys | |
| Cys Cys Glu Leu Ala Cys Asn Pro Ala Cys | |
| Cys Cys Asp Val Cys Cys Asn Pro Ala Cys Ala Gly Cys | |
| Cys Cys Asp Val Cys Cys Asn Pro Ala Cys Thr Gly Cys | |
| Cys Cys Asp Val Cys Cys Asn Pro Ala Cys Ala Gly Cys Tyr | |
| Cys Cys Asp Val Cys Cys Asn Pro Ala Cys Thr Gly Cys Tyr | |
| Cys Cys Glu Leu Cys Cys Tyr Pro Ala Cys Ala Gly Cys | |
| Cys Cys Ile Cys Cys Asn Pro Ala Cys Phe Gly Cys | |
| Cys Cys Asn Tyr Cys Cys Ser Pro Cys Gly Cys | |
| Cys Cys Asp Val Cys Cys Asn Pro Ala Cys Ala Gly Cys | (SEQ ID NO. ) |
| Cys Cys Asp Ala Cys Cys Asn Pro Ala Cys Ala Gly Cys | (SEQ ID NO. ) |
| Cys Cys Asp Cys Cys Cys Asn Pro Ala Cys Ala Gly Cys | (SEQ ID NO. ) |
| Cys Cys Asp Asp Cys Cys Asn Pro Ala Cys Ala Gly Cys | (SEQ ID NO. ) |
| Cys Cys Asp Glu Cys Cys Asn Pro Ala Cys Ala Gly Cys | (SEQ ID NO. ) |
| Cys Cys Asp Phe Cys Cys Asn Pro Ala Cys Ala Gly Cys | (SEQ ID NO. ) |
| Cys Cys Asp Gly Cys Cys Asn Pro Ala Cys Ala Gly Cys | (SEQ ID NO. ) |
| Cys Cys Asp His Cys Cys Asn Pro Ala Cys Ala Gly Cys | (SEQ ID NO. ) |
| Cys Cys Asp Ile Cys Cys Asn Pro Ala Cys Ala Gly Cys | (SEQ ID NO. ) |
| Cys Cys Asp Lys Cys Cys Asn Pro Ala Cys Ala Gly Cys | (SEQ ID NO. ) |
| Cys Cys Asp Leu Cys Cys Asn Pro Ala Cys Ala Gly Cys | (SEQ ID NO. ) |
| Cys Cys Asp Met Cys Cys Asn Pro Ala Cys Ala Gly Cys | (SEQ ID NO. ) |
| Cys Cys Asp Asn Cys Cys Asn Pro Ala Cys Ala Gly Cys | (SEQ ID NO. ) |
| Cys Cys Asp Pro Cys Cys Asn Pro Ala Cys Ala Gly Cys | (SEQ ID NO. ) |
| Cys Cys Asp Gln Cys Cys Asn Pro Ala Cys Ala Gly Cys | (SEQ ID NO. ) |
| Cys Cys Asp Arg Cys Cys Asn Pro Ala Cys Ala Gly Cys | (SEQ ID NO. ) |
| Cys Cys Asp Ser Cys Cys Asn Pro Ala Cys Ala Gly Cys | (SEQ ID NO. ) |
| Cys Cys Asp Thr Cys Cys Asn Pro Ala Cys Ala Gly Cys | (SEQ ID NO. ) |
| Cys Cys Asp Trp Cys Cys Asn Pro Ala Cys Ala Gly Cys | (SEQ ID NO. ) |
| Cys Cys Asp Tyr Cys Cys Asn Pro Ala Cys Ala Gly Cys | (SEQ ID NO. ) |
| Cys Cys Glu Ile Cys Cys Asn Pro Ala Cys Phe Gly Cys | (SEQ ID NO. ) |
| Cys Cys Glu Ala Cys Cys Asn Pro Ala Cys Phe Gly Cys | (SEQ ID NO. ) |
| Cys Cys Glu Cys Cys Cys Asn Pro Ala Cys Phe Gly Cys | (SEQ ID NO. ) |
| Cys Cys Glu Asp Cys Cys Asn Pro Ala Cys Phe Gly Cys | (SEQ ID NO. ) |
| Cys Cys Glu Glu Cys Cys Asn Pro Ala Cys Phe Gly Cys | (SEQ ID NO. ) |
| Cys Cys Glu Phe Cys Cys Asn Pro Ala Cys Phe Gly Cys | (SEQ ID NO. ) |
| Cys Cys Glu Gly Cys Cys Asn Pro Ala Cys Phe Gly Cys | (SEQ ID NO. ) |
| Cys Cys Glu His Cys Cys Asn Pro Ala Cys Phe Gly Cys | (SEQ ID NO. ) |
| Cys Cys Glu Lys Cys Cys Asn Pro Ala Cys Phe Gly Cys | (SEQ ID NO. ) |
| Cys Cys Glu Leu Cys Cys Asn Pro Ala Cys Phe Gly Cys | (SEQ ID NO. ) |
| Cys Cys Glu Met Cys Cys Asn Pro Ala Cys Phe Gly Cys | (SEQ ID NO. ) |
| Cys Cys Glu Asn Cys Cys Asn Pro Ala Cys Phe Gly Cys | (SEQ ID NO. ) |
| Cys Cys Glu Pro Cys Cys Asn Pro Ala Cys Phe Gly Cys | (SEQ ID NO. ) |
| Cys Cys Glu Gln Cys Cys Asn Pro Ala Cys Phe Gly Cys | (SEQ ID NO. ) |
| Cys Cys Glu Arg Cys Cys Asn Pro Ala Cys Phe Gly Cys | (SEQ ID NO. ) |
| Cys Cys Glu Ser Cys Cys Asn Pro Ala Cys Phe Gly Cys | (SEQ ID NO. ) |
| Cys Cys Glu Thr Cys Cys Asn Pro Ala Cys Phe Gly Cys | (SEQ ID NO. ) |
| Cys Cys Glu Val Cys Cys Asn Pro Ala Cys Phe Gly Cys | (SEQ ID NO. ) |
| Cys Cys Glu Trp Cys Cys Asn Pro Ala Cys Phe Gly Cys | (SEQ ID NO. ) |
| Cys Cys Glu Tyr Cys Cys Asn Pro Ala Cys Phe Gly Cys | (SEQ ID NO. ) |
| Cys Cys Glu Leu Cys Cys Asn Pro Ala Cys Ala Pro Cys | (SEQ ID NO. ) |
| Cys Cys Glu Ala Cys Cys Asn Pro Ala Cys Ala Pro Cys | (SEQ ID NO. ) |
| Cys Cys Glu Cys Cys Cys Asn Pro Ala Cys Ala Pro Cys | (SEQ ID NO. ) |
| Cys Cys Glu Asp Cys Cys Asn Pro Ala Cys Ala Pro Cys | (SEQ ID NO. ) |
| Cys Cys Glu Glu Cys Cys Asn Pro Ala Cys Ala Pro Cys | (SEQ ID NO. ) |
| Cys Cys Glu Phe Cys Cys Asn Pro Ala Cys Ala Pro Cys | (SEQ ID NO. ) |
| Cys Cys Glu Gly Cys Cys Asn Pro Ala Cys Ala Pro Cys | (SEQ ID NO. ) |
| Cys Cys Glu His Cys Cys Asn Pro Ala Cys Ala Pro Cys | (SEQ ID NO. ) |
| Cys Cys Glu Ile Cys Cys Asn Pro Ala Cys Ala Pro Cys | (SEQ ID NO. ) |
| Cys Cys Glu Lys Cys Cys Asn Pro Ala Cys Ala Pro Cys | (SEQ ID NO. ) |
| Cys Cys Glu Met Cys Cys Asn Pro Ala Cys Ala Pro Cys | (SEQ ID NO. ) |
| Cys Cys Glu Asn Cys Cys Asn Pro Ala Cys Ala Pro Cys | (SEQ ID NO. ) |
| Cys Cys Glu Pro Cys Cys Asn Pro Ala Cys Ala Pro Cys | (SEQ ID NO. ) |
| Cys Cys Glu Gln Cys Cys Asn Pro Ala Cys Ala Pro Cys | (SEQ ID NO. ) |
| Cys Cys Glu Arg Cys Cys Asn Pro Ala Cys Ala Pro Cys | (SEQ ID NO. ) |
| Cys Cys Glu Ser Cys Cys Asn Pro Ala Cys Ala Pro Cys | (SEQ ID NO. ) |
| Cys Cys Glu Thr Cys Cys Asn Pro Ala Cys Ala Pro Cys | (SEQ ID NO. ) |
| Cys Cys Glu Val Cys Cys Asn Pro Ala Cys Ala Pro Cys | (SEQ ID NO. ) |
| Cys Cys Glu Trp Cys Cys Asn Pro Ala Cys Ala Pro Cys | (SEQ ID NO. ) |
| Cys Cys Glu Tyr Cys Cys Asn Pro Ala Cys Ala Pro Cys | (SEQ ID NO. ) |
| Cys Cys Glu Leu Cys Cys Asn Pro Ala Cys Phe Gly Cys | (SEQ ID NO. ) |
| Cys Cys Glu Ala Cys Cys Asn Pro Ala Cys Phe Gly Cys | (SEQ ID NO. ) |
| Cys Cys Glu Cys Cys Cys Asn Pro Ala Cys Phe Gly Cys | (SEQ ID NO. ) |
| Cys Cys Glu Asp Cys Cys Asn Pro Ala Cys Phe Gly Cys | (SEQ ID NO. ) |
| Cys Cys Glu Glu Cys Cys Asn Pro Ala Cys Phe Gly Cys | (SEQ ID NO. ) |
| Cys Cys Glu Phe Cys Cys Asn Pro Ala Cys Phe Gly Cys | (SEQ ID NO. ) |
| Cys Cys Glu Gly Cys Cys Asn Pro Ala Cys Phe Gly Cys | (SEQ ID NO. ) |
| Cys Cys Glu His Cys Cys Asn Pro Ala Cys Phe Gly Cys | (SEQ ID NO. ) |
| Cys Cys Glu Ile Cys Cys Asn Pro Ala Cys Phe Gly Cys | (SEQ ID NO. ) |
| Cys Cys Glu Lys Cys Cys Asn Pro Ala Cys Phe Gly Cys | (SEQ ID NO. ) |
| Cys Cys Glu Met Cys Cys Asn Pro Ala Cys Phe Gly Cys | (SEQ ID NO. ) |
| Cys Cys Glu Asn Cys Cys Asn Pro Ala Cys Phe Gly Cys | (SEQ ID NO. ) |
| Cys Cys Glu Pro Cys Cys Asn Pro Ala Cys Phe Gly Cys | (SEQ ID NO. ) |
| Cys Cys Glu Gln Cys Cys Asn Pro Ala Cys Phe Gly Cys | (SEQ ID NO. ) |
| Cys Cys Glu Arg Cys Cys Asn Pro Ala Cys Phe Gly Cys | (SEQ ID NO. ) |
| Cys Cys Glu Ser Cys Cys Asn Pro Ala Cys Phe Gly Cys | (SEQ ID NO. ) |
| Cys Cys Glu Thr Cys Cys Asn Pro Ala Cys Phe Gly Cys | (SEQ ID NO. ) |
| Cys Cys Glu Val Cys Cys Asn Pro Ala Cys Phe Gly Cys | (SEQ ID NO. ) |
| Cys Cys Glu Trp Cys Cys Asn Pro Ala Cys Phe Gly Cys | (SEQ ID NO. ) |
| Cys Cys Glu Tyr Cys Cys Asn Pro Ala Cys Phe Gly Cys | (SEQ ID NO. ) |
| Cys Cys Glu Val Cys Cys Asn Pro Ala Cys Ala Gly Cys | (SEQ ID NO. ) |
| Cys Cys Glu Ala Cys Cys Asn Pro Ala Cys Ala Gly Cys | (SEQ ID NO. ) |
| Cys Cys Glu Cys Cys Cys Asn Pro Ala Cys Ala Gly Cys | (SEQ ID NO. ) |
| Cys Cys Glu Asp Cys Cys Asn Pro Ala Cys Ala Gly Cys | (SEQ ID NO. ) |
| Cys Cys Glu Glu Cys Cys Asn Pro Ala Cys Ala Gly Cys | (SEQ ID NO. ) |
| Cys Cys Glu Phe Cys Cys Asn Pro Ala Cys Ala Gly Cys | (SEQ ID NO. ) |
| Cys Cys Glu Gly Cys Cys Asn Pro Ala Cys Ala Gly Cys | (SEQ ID NO. ) |
| Cys Cys Glu His Cys Cys Asn Pro Ala Cys Ala Gly Cys | (SEQ ID NO. ) |
| Cys Cys Glu Ile Cys Cys Asn Pro Ala Cys Ala Gly Cys | (SEQ ID NO. ) |
| Cys Cys Glu Lys Cys Cys Asn Pro Ala Cys Ala Gly Cys | (SEQ ID NO. ) |
| Cys Cys Glu Leu Cys Cys Asn Pro Ala Cys Ala Gly Cys | (SEQ ID NO. ) |
| Cys Cys Glu Met Cys Cys Asn Pro Ala Cys Ala Gly Cys | (SEQ ID NO. ) |
| Cys Cys Glu Asn Cys Cys Asn Pro Ala Cys Ala Gly Cys | (SEQ ID NO. ) |
| Cys Cys Glu Pro Cys Cys Asn Pro Ala Cys Ala Gly Cys | (SEQ ID NO. ) |
| Cys Cys Glu Gln Cys Cys Asn Pro Ala Cys Ala Gly Cys | (SEQ ID NO. ) |
| Cys Cys Glu Arg Cys Cys Asn Pro Ala Cys Ala Gly Cys | (SEQ ID NO. ) |
| Cys Cys Glu Ser Cys Cys Asn Pro Ala Cys Ala Gly Cys | (SEQ ID NO. ) |
| Cys Cys Glu Thr Cys Cys Asn Pro Ala Cys Ala Gly Cys | (SEQ ID NO. ) |
| Cys Cys Glu Trp Cys Cys Asn Pro Ala Cys Ala Gly Cys | (SEQ ID NO. ) |
| and | |
| Cys Cys Glu Tyr Cys Cys Asn Pro Ala Cys Ala Gly Cys. | (SEQ ID NO. ) |

wherein one or more Asn is optionally replaced by a group having a structure selected from (a), (b) and (c).

[0101] In some cases: D′ comprises an amino acid sequence selected from:

Cys Cys Glu Ala Cys Cys Asn Pro Ala Cys Thr Gly
Cys
Cys Cys Glu Arg Cys Cys Asn Pro Ala Cys Thr Gly
Cys
Cys Cys Glu Asn Cys Cys Asn Pro Ala Cys Thr Gly
Cys
Cys Cys Glu Asp Cys Cys Asn Pro Ala Cys Thr Gly
Cys
Cys Cys Glu Cys Cys Cys Asn Pro Ala Cys Thr Gly
Cys
Cys Cys Glu Gln Cys Cys Asn Pro Ala Cys Thr Gly
Cys
Cys Cys Glu Glu Cys Cys Asn Pro Ala Cys Thr Gly
Cys
Cys Cys Glu Gly Cys Cys Asn Pro Ala Cys Thr Gly
Cys
Cys Cys Glu His Cys Cys Asn Pro Ala Cys Thr Gly
Cys
Cys Cys Glu Ile Cys Cys Asn Pro Ala Cys Thr Gly
Cys
Cys Cys Glu Lys Cys Cys Asn Pro Ala Cys Thr Gly
Cys
Cys Cys Glu Met Cys Cys Asn Pro Ala Cys Thr Gly
Cys
Cys Cys Glu Phe Cys Cys Asn Pro Ala Cys Thr Gly
Cys
Cys Cys Glu Pro Cys Cys Asn Pro Ala Cys Thr Gly
Cys
Cys Cys Glu Ser Cys Cys Asn Pro Ala Cys Thr Gly
Cys
Cys Cys Glu Thr Cys Cys Asn Pro Ala Cys Thr Gly
Cys
Cys Cys Glu Trp Cys Cys Asn Pro Ala Cys Thr Gly
Cys
Cys Cys Glu Val Cys Cys Asn Pro Ala Cys Thr Gly
Cys
Cys Cys Glu Tyr Cys Cys Asn Pro Ala Cys Thr Gly
Cys
Cys Cys Glu Leu Cys Cys Asn Pro Ala Cys Thr Gly
Cys
Cys Cys Glu Ala Cys Cys Asn Pro Ala Cys Thr Gly
Cys Tyr
Cys Cys Glu Arg Cys Cys Asn Pro Ala Cys Thr Gly
Cys Tyr
Cys Cys Glu Asn Cys Cys Asn Pro Ala Cys Thr Gly
Cys Tyr
Cys Cys Glu Asp Cys Cys Asn Pro Ala Cys Thr Gly
Cys Tyr
Cys Cys Glu Cys Cys Cys Asn Pro Ala Cys Thr Gly
Cys Tyr
Cys Cys Glu Gln Cys Cys Asn Pro Ala Cys Thr Gly
Cys Tyr
Cys Cys Glu Glu Cys Cys Asn Pro Ala Cys Thr Gly
Cys Tyr
Cys Cys Glu Gly Cys Cys Asn Pro Ala Cys Thr Gly
Cys Tyr
Cys Cys Glu His Cys Cys Asn Pro Ala Cys Thr Gly
Cys Tyr
Cys Cys Glu Ile Cys Cys Asn Pro Ala Cys Thr Gly
Cys Tyr
Cys Cys Glu Lys Cys Cys Asn Pro Ala Cys Thr Gly
Cys Tyr
Cys Cys Glu Met Cys Cys Asn Pro Ala Cys Thr Gly
Cys Tyr
Cys Cys Glu Phe Cys Cys Asn Pro Ala Cys Thr Gly
Cys Tyr
Cys Cys Glu Pro Cys Cys Asn Pro Ala Cys Thr Gly
Cys Tyr
Cys Cys Glu Ser Cys Cys Asn Pro Ala Cys Thr Gly
Cys Tyr
Cys Cys Glu Thr Cys Cys Asn Pro Ala Cys Thr Gly
Cys Tyr
Cys Cys Glu Trp Cys Cys Asn Pro Ala Cys Thr Gly
Cys Tyr
Cys Cys Glu Val Cys Cys Asn Pro Ala Cys Thr Gly
Cys Tyr
Cys Cys Glu Tyr Cys Cys Asn Pro Ala Cys Thr Gly
Cys Tyr
Cys Cys Glu Leu Cys Cys Asn Pro Ala Cys Thr Gly
Cys Tyr

wherein one or more Asn is optionally replaced by a group having a structure selected from (a), (b) and (c).

[0102] Also featured is a polypeptide comprising (consisting of or consisting essentially of) a sequence selected from:

| | |
|---|---|
| Cys Cys Glu Ala Cys Cys Asn Pro Ala Cys Thr Gly Cys | (SEQ ID NO: ) |
| Cys Cys Glu Arg Cys Cys Asn Pro Ala Cys Thr Gly Cys | (SEQ ID NO: ) |
| Cys Cys Glu Asn Cys Cys Asn Pro Ala Cys Thr Gly Cys | (SEQ ID NO: ) |
| Cys Cys Glu Asp Cys Cys Asn Pro Ala Cys Thr Gly Cys | (SEQ ID NO: ) |
| Cys Cys Glu Cys Cys Cys Asn Pro Ala Cys Thr Gly Cys | (SEQ ID NO: ) |
| Cys Cys Glu Gln Cys Cys Asn Pro Ala Cys Thr Gly Cys | (SEQ ID NO: ) |
| Cys Cys Glu Glu Cys Cys Asn Pro Ala Cys Thr Gly Cys | (SEQ ID NO: ) |
| Cys Cys Glu Gly Cys Cys Asn Pro Ala Cys Thr Gly Cys | (SEQ ID NO: ) |
| Cys Cys Glu His Cys Cys Asn Pro Ala Cys Thr Gly Cys | (SEQ ID NO: ) |
| Cys Cys Glu Ile Cys Cys Asn Pro Ala Cys Thr Gly Cys | (SEQ ID NO: ) |
| Cys Cys Glu Lys Cys Cys Asn Pro Ala Cys Thr Gly Cys | (SEQ ID NO: ) |
| Cys Cys Glu Met Cys Cys Asn Pro Ala Cys Thr Gly Cys | (SEQ ID NO: ) |
| Cys Cys Glu Phe Cys Cys Asn Pro Ala Cys Thr Gly Cys | (SEQ ID NO: ) |
| Cys Cys Glu Pro Cys Cys Asn Pro Ala Cys Thr Gly Cys | (SEQ ID NO: ) |
| Cys Cys Glu Ser Cys Cys Asn Pro Ala Cys Thr Gly Cys | (SEQ ID NO: ) |
| Cys Cys Glu Thr Cys Cys Asn Pro Ala Cys Thr Gly Cys | (SEQ ID NO: ) |
| Cys Cys Glu Trp Cys Cys Asn Pro Ala Cys Thr Gly Cys | (SEQ ID NO: ) |
| Cys Cys Glu Val Cys Cys Asn Pro Ala Cys Thr Gly Cys | (SEQ ID NO: ) |
| Cys Cys Glu Tyr Cys Cys Asn Pro Ala Cys Thr Gly Cys | (SEQ ID NO: ) |
| Cys Cys Glu Leu Cys Cys Asn Pro Ala Cys Thr Gly Cys | (SEQ ID NO: ) |
| Cys Cys Glu Ala Cys Cys Asn Pro Ala Cys Thr Gly Cys Tyr | (SEQ ID NO: ) |
| Cys Cys Glu Arg Cys Cys Asn Pro Ala Cys Thr Gly Cys Tyr | (SEQ ID NO: ) |
| Cys Cys Glu Asn Cys Cys Asn Pro Ala Cys Thr Gly Cys Tyr | (SEQ ID NO: ) |
| Cys Cys Glu Asp Cys Cys Asn Pro Ala Cys Thr Gly Cys Tyr | (SEQ ID NO: ) |
| Cys Cys Glu Cys Cys Cys Asn Pro Ala Cys Thr Gly Cys Tyr | (SEQ ID NO: ) |
| Cys Cys Glu Gln Cys Cys Asn Pro Ala Cys Thr Gly Cys Tyr | (SEQ ID NO: ) |
| Cys Cys Glu Glu Cys Cys Asn Pro Ala Cys Thr Gly Cys Tyr | (SEQ ID NO: ) |
| Cys Cys Glu Gly Cys Cys Asn Pro Ala Cys Thr Gly Cys Tyr | (SEQ ID NO: ) |
| Cys Cys Glu His Cys Cys Asn Pro Ala Cys Thr Gly Cys Tyr | (SEQ ID NO: ) |
| Cys Cys Glu Ile Cys Cys Asn Pro Ala Cys Thr Gly Cys Tyr | (SEQ ID NO: ) |
| Cys Cys Glu Lys Cys Cys Asn Pro Ala Cys Thr Gly Cys Tyr | (SEQ ID NO: ) |
| Cys Cys Glu Met Cys Cys Asn Pro Ala Cys Thr Gly Cys Tyr | (SEQ ID NO: ) |
| Cys Cys Glu Phe Cys Cys Asn Pro Ala Cys Thr Gly Cys Tyr | (SEQ ID NO: ) |
| Cys Cys Glu Pro Cys Cys Asn Pro Ala Cys Thr Gly Cys Tyr | (SEQ ID NO: ) |
| Cys Cys Glu Ser Cys Cys Asn Pro Ala Cys Thr Gly Cys Tyr | (SEQ ID NO: ) |
| Cys Cys Glu Thr Cys Cys Asn Pro Ala Cys Thr Gly Cys Tyr | (SEQ ID NO: ) |
| Cys Cys Glu Trp Cys Cys Asn Pro Ala Cys Thr Gly Cys Tyr | (SEQ ID NO: ) |
| Cys Cys Glu Val Cys Cys Asn Pro Ala Cys Thr Gly Cys Tyr | (SEQ ID NO: ) |
| Cys Cys Glu Tyr Cys Cys Asn Pro Ala Cys Thr Gly Cys Tyr | (SEQ ID NO: ) |
| Cys Cys Glu Leu Cys Cys Asn Pro Ala Cys Thr Gly Cys Tyr | (SEQ ID NO: ) |

wherein one or more Asn is optionally replaced by a group having a structure selected from (a), (b) and (c):

[chemical structure]

[0103] In various embodiments: at least one Asn is replaced by a group having structure (a at least one Asn is replaced by a group having structure (b); at least one Asn is replaced by a group having structure (c); an Asn at the amino terminus of the polypeptide is replaced by a structure selected from (a), (b) and (c); an Asn at the carboxy terminus of the polypeptide is replaced by a structure (b); an Asn that is neither at the carboxy terminus of the polypeptide nor the at the amino terminus of the polypeptide is replaced by a structure selected from (a), (b) and (c); all Asn are replaced by a structure selected from (a), (b) and (c); at least two Asn are replaced by a structure selected from (a), (b) and (c); at least three Asn are replaced by a structure selected from (a), (b) and (c); at least four Asn are replaced by a structure selected from (a), (b) and (c); at least five Asn are replaced by a structure selected from (a), (b) and (c); at least six Asn are replaced by a structure selected from (a), (b) and (c); all Asn replaced by a structure selected from (a), (b) and (c) are replaced by structure (a); all Asn replaced by a structure selected from (a), (b) and (c) are replaced by structure (b); all Asn replaced by a structure selected from (a), (b) and (c) are replaced by structure (c); at least one Asn within A′, when A′ is present, is replaced by a structure selected from (a), (b) and (c); at least one Asn within B′, when B′ is present, is replaced by a structure selected from (a), (b) and (c); at least one Asn within C′, when C′ is present, is replaced by a structure selected from (a), (b) and (c); at least one Asn within D′, when D′ is present, is replaced by a structure selected from (a), (b) and (c); at least one Asn within E′, when E′ is present, is replaced by a structure selected from (a), (b) and (c); at least one Asn within A′, when A′ is present, is replaced by structure (a); at least one Asn within B′, when B′ is present, is replaced by structure (a); at least one Asn within C′, when C′ is present, is replaced by structure (a); at least one Asn within D′, when D′ is present, is replaced by structure (a); at least one Asn within E′, when E′ is present, is replaced by structure (a); at least one Asn within A′, when A′ is present, is replaced by structure (b); at least one Asn within B′, when B′ is present, is replaced by structure (b); at least one Asn within C′, when C′ is present, is replaced by structure (b); at least one Asn within D′, when D′ is present, is replaced by structure (b); at least one Asn within E′, when E′ is present, is replaced by structure (b); at least one Asn within A′, when A′ is present, is replaced by structure (c); at least one Asn within B′, when B′ is present, is replaced by structure (c); at least one Asn within C′, when C′ is present, is replaced by structure (c); at least one Asn within D′, when D′ is present, is replaced by structure (c); and least one Asn within E′, when E′ is present, is replaced by structure (c)

[0104] Also disclosed a polypeptide produced by the hydrolysis of structure (c) within any of the aforementioned polypeptides.

[0105] In various embodiments of the aforementioned polypeptides: D′ comprises (consists of or consists essentially of) an amino acid sequence selected from:

CCELCCNPACTGCY;
CCEYCCNPACTGCY;
CCEFCCNPACTGCY;
CCEWCCNPACTGCY;
CCELCCNPACTGC;
CCEYCCNPACTGC;
CCEFCCNPACTGC;
and
CCEWCCNPACTGC,

wherein one or more Asn is optionally replaced by a group having a structure selected from (a), (b) and (c).

[0106] In various embodiments: the Asn within D′ replaced by a group having structure (a); the Asn within D′ replaced by a group having structure (b); the Asn within D′ replaced by a group having structure (c); A′ comprises an amino acid sequence selected from:

MKKLMLAIFISVLSFPSFS
MKKSILFIFLSVLSFSPFP

wherein one or more Asn is optionally replaced by a group having a structure selected from (a), (b) and (c); B′ comprises an amino acid sequence selected from:

QSTESLDSSKEKITLETKKCDVVKNNSEKKSENMN
QDAKPVESSKEKITLESKKCNIAKKSNKSGPESM
QDAKPAGSSKEKITLESKKCNIVKKNNESSPESM
VLSFSPFAQDAKPVESSKEKITLESKKCNIAKKSNKSDPESM

wherein one or more Asn is optionally replaced by a group having a structure selected from (a), (b) and (c); C′ comprises an amino acid sequence selected from:

### NTFY

### NSSNY

[0107] wherein one or more Asn is optionally replaced by a group having a structure selected from (a), (b) and (c); E′ comprises an amino acid sequence selected from:

Y
LN

wherein one or more Asn is optionally replaced by a group having a structure selected from (a), (b) and (c).

[0108] Also described is a polypeptide produced by the hydrolysis of structure (b) within an aforementioned polypeptide.

[0109] Also described is a polypeptide produced by the hydrolysis of structure (c) within an aforementioned polypeptide.

[0110] Also described is a polypeptide produced by the hydrolysis of structure (a) within an aforementioned polypeptide.

[0111] In various embodiments: none of the Asn are replaced by a structure selected from (a), (b) and (c)

[0112] In various embodiments the polypeptide is purified.

[0113] Also described is a pharmaceutical composition comprising an aforementioned polypeptide.

[0114] A method of treating heart failure comprising administering the pharmaceutical composition comprising an aforementioned polypeptide is also described.

[0115] A method of treating benign prostatic hyperplasia comprising administering the pharmaceutical composition comprising an aforementioned polypeptide is also described.

[0116] A method of treating obesity comprising administering the pharmaceutical composition comprising an aforementioned polypeptide is also described.

[0117] A method of treating a gastrointestinal disorder comprising administering the pharmaceutical composition comprising an aforementioned polypeptide is also described.

[0118] In various embodiments: the gastrointestinal disorder is selected from: a gastrointestinal motility disorder, chronic intestinal pseudo-obstruction, colonic pseudo-obstruction, Crohn's disease, duodenogastric reflux, dyspepsia, functional dyspepsia, nonulcer dyspepsia, a functional gastrointestinal disorder, functional heartburn, gastroesophageal reflux disease (GERD), gastroparesis, irritable bowel syndrome, post-operative ileus, inflammatory bowel disorder, ulcerative colitis, constipation, chronic constipation, chronic idiopathic constipation; diarrhea-predominant irritable bowel syndrome; constipation-predominant irritable bowel syndrome; or alternating-irritable bowel syndrome.

[0119] A method for increasing gastrointestinal motility comprising administering a pharmaceutical composition comprising an aforementioned polypeptide is described.

[0120] Also described is a method for decreasing gastrointestinal pain or visceral pain comprising administering a pharmaceutical composition comprising an aforementioned polypeptide.

[0121] Also described is a method for preventing or treating a side-effect associated with opioid administration comprising administering a pharmaceutical composition comprising an aforementioned polypeptide.

[0122] Also described is a method of preventing or treating a side-effect associated with opioid administration, the method comprising administering to a patient that is being treated with an opioid, an aforementioned polypeptide wherein none of the Asn are replaced by a structure selected from (a), (b), and (c).

[0123] In various embodiments: the patient is being treated with an opioid selected from the group consisting of alfentanil, buprenorphine, butorphanol, codeine, dezocine, dihydrocodeine, fentanyl, hydrocodone, hydromorphone, levorphanol, meperidine (pethidine), methadone, morphine, nalbuphine, oxycodone, oxymorphone, pentazocine, propiram, propoxyphene, sufentanil and tramadol; the patient is being treated with an opioid is selected from the group consisting of: morphine, codeine, oxycodone, hydrocodone, dihydrocodeine, propoxyphene, fentanyl and tramadol; the side effect is selected from the group consisting of constipation, nausea and vomiting; the side effect is constipation; the side effect is nausea; the side effect is vomiting; the method further comprises administering an opioid antagonist (e.g., naloxone or naltrexone); and the polypeptide comprises a sequence selected from:

CCELCCNPACTGCY;
CCEYCCNPACTGCY;
CCEFCCNPACTGCY;
CCEWCCNPACTGCY;
CCELCCNPACTGC;
CCEYCCNPACTGC;
CCEFCCNPACTGC;
and
CCEWCCNPACTGC.

[0124] Also described is a method of treating pain or preventing pain comprising administering an opioid and a GCC receptor agonist. In various embodiments: the GCC receptor agonist is an aforementioned polypeptide (e.g., an aforementioned polypeptide wherein none of the Asn are replaced by a structure selected from (a), (b) and (c)); the opioid is selected from the group consisting of alfentanil, buprenorphine, butorphanol, codeine, dezocine, dihydrocodeine, fentanyl, hydrocodone, hydromorphone, levorphanol, meperidine (pethidine), methadone, morphine, nalbuphine, oxycodone, oxymorphone, pentazocine, propiram, propoxyphene, sufentanil and tramadol; the opioid is selected from the group consisting of: morphine, codeine, oxycodone, hydrocodone, dihydrocodeine, propoxyphene, fentanyl and tramadol; and the GCC receptor agonist is a polypeptide comprising a sequence selected from:

CCELCCNPACTGCY;
CCEYCCNPACTGCY;
CCEFCCNPACTGCY;
CCEWCCNPACTGCY;
CCELCCNPACTGC;
CCEYCCNPACTGC;
CCEFCCNPACTGC;
and
CCEWCCNPACTGC.

[0125] Also described is a method of treating or preventing pain comprising administering a pharmaceutical composition comprising an opioid and a GCC receptor agonist. In various embodiments: the GCC receptor agonist is an aforementioned polypeptide; the GCC receptor agonist is an aforementioned polypeptide wherein none of the Asn are replaced by a structure selected from (a), (b), and (c); the opioid is selected from the group consisting of alfentanil, buprenorphine, butorphanol, codeine, dezocine, dihydrocodeine, fentanyl, hydrocodone, hydromorphone, levorphanol, meperidine (pethidine), methadone, morphine, nalbuphine, oxycodone, oxymorphone, pentazocine, propiram, propoxyphene, sufentanil and tramadol; the opioid is selected from the group consisting of: morphine, codeine, oxycodone, hydrocodone, dihydrocodeine, propoxyphene, fentanyl and tramadol; the GCC receptor agonist is a polypeptide comprising a sequence selected from:

CCELCCNPACTGCY;
CCEYCCNPACTGCY;
CCEFCCNPACTGCY;
CCEWCCNPACTGCY;
CCELCCNPACTGC;
CCEYCCNPACTGC;
CCEFCCNPACTGC;
and
CCEWCCNPACTGC.

[0126] In various embodiments: the pain is visceral pain; the pain is gastrointestinal pain; the pain is acute pain; the acute pain is inflammatory pain; the acute pain is neuropathic pain; the acute pain is post surgical pain; the acute pain is bone pain; and the pain is chronic pain.

[0127] Also described is a pharmaceutical composition comprising an opioid and a GCC receptor agonist (e.g., an aforementioned polypeptide with or without Asn replaced by a structure selected from (a), (b) and (c)). In various embodiments: the opioid is selected from the group consisting of alfentanil, buprenorphine, butorphanol, codeine, dezocine, dihydrocodeine, fentanyl, hydrocodone, hydromorphone, levorphanol, meperidine (pethidine), methadone, morphine, nalbuphine, oxycodone, oxymorphone, pentazocine, propiram, propoxyphene, sufentanil and tramadol; the opioid is selected from the group consisting of: morphine, codeine, oxycodone, hydrocodone, dihydrocodeine, propoxyphene, fentanyl and tramadol; the GCC receptor agonist is a polypeptide comprising a sequence selected from:

CCELCCNPACTGCY;
CCEYCCNPACTGCY;
CCEFCCNPACTGCY;
CCEWCCNPACTGCY;
CCELCCNPACTGC;
CCEYCCNPACTGC;
CCEFCCNPACTGC;
and
CCEWCCNPACTGC.

[0128] Also described is a pharmaceutical kit comprising:

[0129] (a) a first container containing pharmaceutical dosage units comprising an effective amount of an opioid; and

[0130] (b) a second container containing pharmaceutical dosage units comprising an effective of a GCC receptor agonist (e.g., an aforementioned polypeptide with or without Asn replaced by a structure selected from (a), (b) and (c)).

[0131] In various embodiments: the opioid is selected from the group consisting of alfentanil, buprenorphine, butorphanol, codeine, dezocine, dihydrocodeine, fentanyl, hydrocodone, hydromorphone, levorphanol, meperidine (pethidine), methadone, morphine, nalbuphine, oxycodone, oxymorphone, pentazocine, propiram, propoxyphene, sufentanil and tramadol; the opioid is selected from the group consisting of: morphine, codeine, oxycodone, hydrocodone, dihydrocodeine, propoxyphene, fentanyl and tramadol; the GCC receptor agonist is a polypeptide comprising a sequence selected from:

CCELCCNPACTGCY;
CCEYCCNPACTGCY;
CCEFCCNPACTGCY;
CCEWCCNPACTGCY;
CCELCCNPACTGC;
CCEYCCNPACTGC;
CCEFCCNPACTGC;
and
CCEWCCNPACTGC.

[0132] Also described is a purified polypeptide or salt thereof comprising the amino acid sequence:

A′-B′-C′-D′-E′ wherein:

[0133] A′ is an amino acid sequence comprising a pre sequence depicted in FIG. 21 or is missing;

[0134] B′ is an amino acid sequence comprising a pro sequence depicted in FIG. 21 or is missing;

[0135] C′ is an amino acid sequence comprising an N-terminal non-core sequence depicted in FIG. 21 or is missing;

[0136] D′ is an amino acid sequence comprising a GC-C receptor agonist polypeptide amino acid sequence; and

[0137] E′ is an amino acid sequence comprising a C-terminal non-core sequence depicted in FIG. 21.

[0138] In various embodiments: D′ comprises an amino acid sequence selected from:

| | |
|---|---|
| Gln Ser Ser Asn Tyr Cys Cys Glu Tyr Cys Cys Asn Pro Ala Cys Thr Gly Cys | (SEQ ID NO: ---) |
| Tyr | |
| Asn Thr Ser Asn Tyr Cys Cys Glu Tyr Cys Cys Asn Pro Ala Cys Thr Gly Cys | (SEQ ID NO: ---) |
| Tyr | |
| Asn Leu Ser Asn Tyr Cys Cys Glu Tyr Cys Cys Asn Pro Ala Cys Thr Gly Cys | (SEQ ID NO: ---) |
| Tyr | |
| Asn Ile Ser Asn Tyr Cys Cys Glu Tyr Cys Cys Asn Pro Ala Cys Thr Gly Cys | (SEQ ID NO: ---) |
| Tyr | |
| Asn Ser Ser Gln Tyr Cys Cys Glu Tyr Cys Cys Asn Pro Ala Cys Thr Gly Cys | (SEQ ID NO: ---) |
| Tyr | |
| Ser Ser Asn Tyr Cys Cys Glu Tyr Cys Cys Asn Pro Ala Cys Thr Gly Cys Tyr | (SEQ ID NO: ---) |
| Gln Ser Ser Gln Tyr Cys Cys Glu Tyr Cys Cys Asn Pro Ala Cys Thr Gly Cys | (SEQ ID NO: ---) |
| Tyr | |
| Ser Ser Gln Tyr Cys Cys Glu Tyr Cys Cys Asn Pro Ala Cys Thr Gly Cys Tyr | (SEQ ID NO: ---) |
| Asn Ser Ser Asn Tyr Cys Cys Glu Ala Cys Cys Asn Pro Ala Cys Thr Gly Cys | (SEQ ID NO: ) |
| Tyr | |
| Asn Ser Ser Asn Tyr Cys Cys Glu Arg Cys Cys Asn Pro Ala Cys Thr Gly Cys | (SEQ ID NO: ) |
| Tyr | |
| Asn Ser Ser Asn Tyr Cys Cys Glu Asn Cys Cys Asn Pro Ala Cys Thr Gly Cys | (SEQ ID NO: ) |
| Tyr | |
| Asn Ser Ser Asn Tyr Cys Cys Glu Asp Cys Cys Asn Pro Ala Cys Thr Gly Cys | (SEQ ID NO: ) |
| Tyr | |
| Asn Ser Ser Asn Tyr Cys Cys Glu Cys Cys Cys Asn Pro Ala Cys Thr Gly Cys | (SEQ ID NO: ) |
| Tyr | |
| Asn Ser Ser Asn Tyr Cys Cys Glu Gln Cys Cys Asn Pro Ala Cys Thr Gly Cys | (SEQ ID NO: ) |
| Tyr | |
| Asn Ser Ser Asn Tyr Cys Cys Glu Glu Cys Cys Asn Pro Ala Cys Thr Gly Cys | (SEQ ID NO: ) |
| Tyr | |
| Asn Ser Ser Asn Tyr Cys Cys Glu Gly Cys Cys Asn Pro Ala Cys Thr Gly Cys | (SEQ ID NO: ) |
| Tyr | |
| Asn Ser Ser Asn Tyr Cys Cys Glu His Cys Cys Asn Pro Ala Cys Thr Gly Cys | (SEQ ID NO: ) |
| Tyr | |
| Asn Ser Ser Asn Tyr Cys Cys Glu Ile Cys Cys Asn Pro Ala Cys Thr Gly Cys | (SEQ ID NO: ) |
| Tyr | |
| Asn Ser Ser Asn Tyr Cys Cys Glu Lys Cys Cys Asn Pro Ala Cys Thr Gly Cys | (SEQ ID NO: ) |
| Tyr | |
| Asn Ser Ser Asn Tyr Cys Cys Glu Met Cys Cys Asn Pro Ala Cys Thr Gly Cys | (SEQ ID NO: ) |
| Tyr | |
| Asn Ser Ser Asn Tyr Cys Cys Glu Phe Cys Cys Asn Pro Ala Cys Thr Gly Cys | (SEQ ID NO: ) |
| Tyr | |
| Asn Ser Ser Asn Tyr Cys Cys Glu Pro Cys Cys Asn Pro Ala Cys Thr Gly Cys | (SEQ ID NO: ) |
| Tyr | |
| Asn Ser Ser Asn Tyr Cys Cys Glu Ser Cys Cys Asn Pro Ala Cys Thr Gly Cys | (SEQ ID NO: ) |
| Tyr | |
| Asn Ser Ser Asn Tyr Cys Cys Glu Thr Cys Cys Asn Pro Ala Cys Thr Gly Cys | (SEQ ID NO: ) |
| Tyr | |
| Asn Ser Ser Asn Tyr Cys Cys Glu Trp Cys Cys Asn Pro Ala Cys Thr Gly Cys | (SEQ ID NO: ) |
| Tyr | |
| Asn Ser Ser Asn Tyr Cys Cys Glu Val Cys Cys Asn Pro Ala Cys Thr Gly Cys | (SEQ ID NO: ) |
| Tyr | |
| Cys Cys Glu Ala Cys Cys Asn Pro Ala Cys Thr Gly Cys Tyr | (SEQ ID NO: ) |
| Cys Cys Glu Arg Cys Cys Asn Pro Ala Cys Thr Gly Cys Tyr | (SEQ ID NO: ) |
| Cys Cys Glu Asn Cys Cys Asn Pro Ala Cys Thr Gly Cys Tyr | (SEQ ID NO: ) |
| Cys Cys Glu Asp Cys Cys Asn Pro Ala Cys Thr Gly Cys Tyr | (SEQ ID NO: ) |
| Cys Cys Glu Cys Cys Cys Asn Pro Ala Cys Thr Gly Cys Tyr | (SEQ ID NO: ) |
| Cys Cys Glu Gln Cys Cys Asn Pro Ala Cys Thr Gly Cys Tyr | (SEQ ID NO: ) |
| Cys Cys Glu Glu Cys Cys Asn Pro Ala Cys Thr Gly Cys Tyr | (SEQ ID NO: ) |
| Cys Cys Glu Gly Cys Cys Asn Pro Ala Cys Thr Gly Cys Tyr | (SEQ ID NO: ) |
| Cys Cys Glu His Cys Cys Asn Pro Ala Cys Thr Gly Cys Tyr | (SEQ ID NO: ) |
| Cys Cys Glu Ile Cys Cys Asn Pro Ala Cys Thr Gly Cys Tyr | (SEQ ID NO: ) |
| Cys Cys Glu Lys Cys Cys Asn Pro Ala Cys Thr Gly Cys Tyr | (SEQ ID NO: ) |
| Cys Cys Glu Met Cys Cys Asn Pro Ala Cys Thr Gly Cys Tyr | (SEQ ID NO: ) |
| Cys Cys Glu Phe Cys Cys Asn Pro Ala Cys Thr Gly Cys Tyr | (SEQ ID NO: ) |
| Cys Cys Glu Pro Cys Cys Asn Pro Ala Cys Thr Gly Cys Tyr | (SEQ ID NO: ) |
| Cys Cys Glu Ser Cys Cys Asn Pro Ala Cys Thr Gly Cys Tyr | (SEQ ID NO: ) |
| Cys Cys Glu Thr Cys Cys Asn Pro Ala Cys Thr Gly Cys Tyr | (SEQ ID NO: ) |
| Cys Cys Glu Trp Cys Cys Asn Pro Ala Cys Thr Gly Cys Tyr | (SEQ ID NO: ) |
| Cys Cys Glu Val Cys Cys Asn Pro Ala Cys Thr Gly Cys Tyr | (SEQ ID NO: ) |
| Cys Cys Glu Tyr Cys Cys Asn Pro Ala Cys Thr Gly Cys | (SEQ ID NO: 6) |
| Cys Cys Glu Ala Cys Cys Asn Pro Ala Cys Thr Gly Cys | (SEQ ID NO: ) |
| Cys Cys Glu Arg Cys Cys Asn Pro Ala Cys Thr Gly Cys | (SEQ ID NO: ) |
| Cys Cys Glu Asn Cys Cys Asn Pro Ala Cys Thr Gly Cys | (SEQ ID NO: ) |
| Cys Cys Glu Asp Cys Cys Asn Pro Ala Cys Thr Gly Cys | (SEQ ID NO: ) |
| Cys Cys Glu Cys Cys Cys Asn Pro Ala Cys Thr Gly Cys | (SEQ ID NO: ) |
| Cys Cys Glu Gln Cys Cys Asn Pro Ala Cys Thr Gly Cys | (SEQ ID NO: ) |
| Cys Cys Glu Glu Cys Cys Asn Pro Ala Cys Thr Gly Cys | (SEQ ID NO: ) |
| Cys Cys Glu Gly Cys Cys Asn Pro Ala Cys Thr Gly Cys | (SEQ ID NO: ) |
| Cys Cys Glu His Cys Cys Asn Pro Ala Cys Thr Gly Cys | (SEQ ID NO: ) |
| Cys Cys Glu Ile Cys Cys Asn Pro Ala Cys Thr Gly Cys | (SEQ ID NO: ) |
| Cys Cys Glu Lys Cys Cys Asn Pro Ala Cys Thr Gly Cys | (SEQ ID NO: ) |
| Cys Cys Glu Met Cys Cys Asn Pro Ala Cys Thr Gly Cys | (SEQ ID NO: ) |
| Cys Cys Glu Phe Cys Cys Asn Pro Ala Cys Thr Gly Cys | (SEQ ID NO: ) |
| Cys Cys Glu Pro Cys Cys Asn Pro Ala Cys Thr Gly Cys | (SEQ ID NO: ) |
| Cys Cys Glu Ser Cys Cys Asn Pro Ala Cys Thr Gly Cys | (SEQ ID NO: ) |
| Cys Cys Glu Thr Cys Cys Asn Pro Ala Cys Thr Gly Cys; | (SEQ ID NO: ) |
| Cys Cys Glu Trp Cys Cys Asn Pro Ala Cys Thr Gly Cys | (SEQ ID NO: ) |
| Cys Cys Glu Val Cys Cys Asn Pro Ala Cys Thr Gly Cys | (SEQ ID NO: ). |
| Cys Cys Glu Leu Cys Cys Ala Pro Ala Cys Thr Gly Cys Tyr | |
| Cys Cys Glu Leu Cys Cys Val Pro Ala Cys Thr Gly Cys Tyr | |
| Cys Cys Glu Leu Cys Cys Leu Pro Ala Cys Thr Gly Cys Tyr | |
| Cys Cys Glu Leu Cys Cys Ile Pro Ala Cys Thr Gly Cys Tyr | |
| Cys Cys Glu Leu Cys Cys Pro Pro Ala Cys Thr Gly Cys Tyr | |
| Cys Cys Glu Leu Cys Cys Met Pro Ala Cys Thr Gly Cys Tyr | |
| Cys Cys Glu Leu Cys Cys Phe Pro Ala Cys Thr Gly Cys Tyr | |
| Cys Cys Glu Leu Cys Cys Trp Pro Ala Cys Thr Gly Cys Tyr | |
| Cys Cys Glu Leu Cys Cys Gly Pro Ala Cys Thr Gly Cys Tyr | |
| Cys Cys Glu Leu Cys Cys Ser Pro Ala Cys Thr Gly Cys Tyr | |
| Cys Cys Glu Leu Cys Cys Thr Pro Ala Cys Thr Gly Cys Tyr | |
| Cys Cys Glu Leu Cys Cys Cys Pro Ala Cys Thr Gly Cys Tyr | |
| Cys Cys Glu Leu Cys Cys Gln Pro Ala Cys Thr Gly Cys Tyr | |
| Cys Cys Glu Leu Cys Cys Tyr Pro Ala Cys Thr Gly Cys Tyr | |
| Cys Cys Glu Leu Cys Cys Asp Pro Ala Cys Thr Gly Cys Tyr | |
| Cys Cys Glu Leu Cys Cys Glu Pro Ala Cys Thr Gly Cys Tyr | |
| Cys Cys Glu Leu Cys Cys Lys Pro Ala Cys Thr Gly Cys Tyr | |
| Cys Cys Glu Leu Cys Cys Arg Pro Ala Cys Thr Gly Cys Tyr | |
| Cys Cys Glu Leu Cys Cys His Pro Ala Cys Thr Gly Cys Tyr | |
| Cys Cys Glu Tyr Cys Cys Ala Pro Ala Cys Thr Gly Cys Tyr | |
| Cys Cys Glu Tyr Cys Cys Val Pro Ala Cys Thr Gly Cys Tyr | |
| Cys Cys Glu Tyr Cys Cys Leu Pro Ala Cys Thr Gly Cys Tyr | |
| Cys Cys Glu Tyr Cys Cys Ile Pro Ala Cys Thr Gly Cys Tyr | |
| Cys Cys Glu Tyr Cys Cys Pro Pro Ala Cys Thr Gly Cys Tyr | |
| Cys Cys Glu Tyr Cys Cys Met Pro Ala Cys Thr Gly Cys Tyr | |
| Cys Cys Glu Tyr Cys Cys Phe Pro Ala Cys Thr Gly Cys Tyr | |
| Cys Cys Glu Tyr Cys Cys Trp Pro Ala Cys Thr Gly Cys Tyr | |
| Cys Cys Glu Tyr Cys Cys Gly Pro Ala Cys Thr Gly Cys Tyr | |
| Cys Cys Glu Tyr Cys Cys Ser Pro Ala Cys Thr Gly Cys Tyr | |
| Cys Cys Glu Tyr Cys Cys Thr Pro Ala Cys Thr Gly Cys Tyr | |
| Cys Cys Glu Tyr Cys Cys Cys Pro Ala Cys Thr Gly Cys Tyr | |
| Cys Cys Glu Tyr Cys Cys Gln Pro Ala Cys Thr Gly Cys Tyr | |
| Cys Cys Glu Tyr Cys Cys Tyr Pro Ala Cys Thr Gly Cys Tyr | |
| Cys Cys Glu Tyr Cys Cys Asp Pro Ala Cys Thr Gly Cys Tyr | |
| Cys Cys Glu Tyr Cys Cys Glu Pro Ala Cys Thr Gly Cys Tyr | |
| Cys Cys Glu Tyr Cys Cys Lys Pro Ala Cys Thr Gly Cys Tyr | |
| Cys Cys Glu Tyr Cys Cys Arg Pro Ala Cys Thr Gly Cys Tyr | |
| Cys Cys Glu Tyr Cys Cys His Pro Ala Cys Thr Gly Cys Tyr | |
| Cys Cys Glu Leu Cys Cys Ala Pro Ala Cys Thr Gly Cys | |
| Cys Cys Glu Leu Cys Cys Val Pro Ala Cys Thr Gly Cys | |
| Cys Cys Glu Leu Cys Cys Leu Pro Ala Cys Thr Gly Cys | |
| Cys Cys Glu Leu Cys Cys Ile Pro Ala Cys Thr Gly Cys | |
| Cys Cys Glu Leu Cys Cys Pro Pro Ala Cys Thr Gly Cys | |
| Cys Cys Glu Leu Cys Cys Met Pro Ala Cys Thr Gly Cys | |
| Cys Cys Glu Leu Cys Cys Phe Pro Ala Cys Thr Gly Cys | |
| Cys Cys Glu Leu Cys Cys Trp Pro Ala Cys Thr Gly Cys | |
| Cys Cys Glu Leu Cys Cys Gly Pro Ala Cys Thr Gly Cys | |
| Cys Cys Glu Leu Cys Cys Ser Pro Ala Cys Thr Gly Cys | |
| Cys Cys Glu Leu Cys Cys Thr Pro Ala Cys Thr Gly Cys | |
| Cys Cys Glu Leu Cys Cys Cys Pro Ala Cys Thr Gly Cys | |
| Cys Cys Glu Leu Cys Cys Gln Pro Ala Cys Thr Gly Cys | |
| Cys Cys Glu Leu Cys Cys Tyr Pro Ala Cys Thr Gly Cys | |
| Cys Cys Glu Leu Cys Cys Asp Pro Ala Cys Thr Gly Cys | |
| Cys Cys Glu Leu Cys Cys Glu Pro Ala Cys Thr Gly Cys | |
| Cys Cys Glu Leu Cys Cys Lys Pro Ala Cys Thr Gly Cys | |
| Cys Cys Glu Leu Cys Cys Arg Pro Ala Cys Thr Gly Cys | |
| Cys Cys Glu Leu Cys Cys His Pro Ala Cys Thr Gly Cys | |
| Cys Cys Glu Tyr Cys Cys Ala Pro Ala Cys Thr Gly Cys | |
| Cys Cys Glu Tyr Cys Cys Val Pro Ala Cys Thr Gly Cys | |
| Cys Cys Glu Tyr Cys Cys Leu Pro Ala Cys Thr Gly Cys | |
| Cys Cys Glu Tyr Cys Cys Ile Pro Ala Cys Thr Gly Cys | |
| Cys Cys Glu Tyr Cys Cys Pro Pro Ala Cys Thr Gly Cys | |
| Cys Cys Glu Tyr Cys Cys Met Pro Ala Cys Thr Gly Cys | |
| Cys Cys Glu Tyr Cys Cys Phe Pro Ala Cys Thr Gly Cys | |
| Cys Cys Glu Tyr Cys Cys Trp Pro Ala Cys Thr Gly Cys | |
| Cys Cys Glu Tyr Cys Cys Gly Pro Ala Cys Thr Gly Cys | |
| Cys Cys Glu Tyr Cys Cys Ser Pro Ala Cys Thr Gly Cys | |
| Cys Cys Glu Tyr Cys Cys Thr Pro Ala Cys Thr Gly Cys | |
| Cys Cys Glu Tyr Cys Cys Cys Pro Ala Cys Thr Gly Cys | |
| Cys Cys Glu Tyr Cys Cys Gln Pro Ala Cys Thr Gly Cys | |
| Cys Cys Glu Tyr Cys Cys Tyr Pro Ala Cys Thr Gly Cys | |
| Cys Cys Glu Tyr Cys Cys Asp Pro Ala Cys Thr Gly Cys | |
| Cys Cys Glu Tyr Cys Cys Glu Pro Ala Cys Thr Gly Cys | |
| Cys Cys Glu Tyr Cys Cys Lys Pro Ala Cys Thr Gly Cys | |
| Cys Cys Glu Tyr Cys Cys Arg Pro Ala Cys Thr Gly Cys | |
| Cys Cys Glu Tyr Cys Cys His Pro Ala Cys Thr Gly Cys | |
| Cys Cys Glu Leu Cys Cys Asn Pro Thr Cys Thr Gly Cys Tyr | |
| Cys Cys Glu Tyr Cys Cys Asn Pro Thr Cys Thr Gly Cys Tyr | |
| Cys Cys Glu Leu Cys Cys Asn Pro Thr Cys Thr Gly Cys | |
| Cys Cys Glu Tyr Cys Cys Asn Pro Thr Cys Thr Gly Cys | |
| Cys Cys Glu Phe Cys Cys Asn Pro Thr Cys Thr Gly Cys Tyr | |
| Cys Cys Glu Phe Cys Cys Asn Pro Thr Cys Thr Gly Cys | |
| Cys Cys Glu Trp Cys Cys Asn Pro Thr Cys Thr Gly Cys Tyr | |
| Cys Cys Glu Trp Cys Cys Asn Pro Thr Cys Thr Gly Cys | |
| Cys Cys Glu Leu Cys Cys Asn Gly Ala Cys Thr Gly Cys Tyr | |
| Cys Cys Glu Tyr Cys Cys Asn Gly Ala Cys Thr Gly Cys Tyr | |
| Cys Cys Glu Leu Cys Cys Asn Gly Ala Cys Thr Gly Cys | |
| Cys Cys Glu Tyr Cys Cys Asn Gly Ala Cys Thr Gly Cys | |
| Cys Cys Glu Phe Cys Cys Asn Gly Ala Cys Thr Gly Cys Tyr | |
| Cys Cys Glu Phe Cys Cys Asn Gly Ala Cys Thr Gly Cys | |
| Cys Cys Glu Trp Cys Cys Asn Gly Ala Cys Thr Gly Cys Tyr | |
| Cys Cys Glu Trp Cys Cys Asn Gly Ala Cys Thr Gly Cys | |
| Cys Cys Glu Leu Cys Cys Asn Pro Ala Cys Val Gly Cys Tyr | |
| Cys Cys Glu Tyr Cys Cys Asn Pro Ala Cys Val Gly Cys Tyr | |
| Cys Cys Glu Leu Cys Cys Asn Pro Ala Cys Val Gly Cys | |
| Cys Cys Glu Tyr Cys Cys Asn Pro Ala Cys Val Gly Cys | |
| Cys Cys Glu Phe Cys Cys Asn Pro Ala Cys Val Gly Cys Tyr | |
| Cys Cys Glu Phe Cys Cys Asn Pro Ala Cys Val Gly Cys | |
| Cys Cys Glu Trp Cys Cys Asn Pro Ala Cys Val Gly Cys Tyr | |
| Cys Cys Glu Trp Cys Cys Asn Pro Ala Cys Val Gly Cys | |
| Cys Cys Glu Leu Cys Cys Asn Pro Ala Cys Gly Gly Cys Tyr | |
| Cys Cys Glu Tyr Cys Cys Asn Pro Ala Cys Gly Gly Cys Tyr | |
| Cys Cys Glu Leu Cys Cys Asn Pro Ala Cys Gly Gly Cys | |
| Cys Cys Glu Tyr Cys Cys Asn Pro Ala Cys Gly Gly Cys | |
| Cys Cys Glu Phe Cys Cys Asn Pro Ala Cys Gly Gly Cys Tyr | |
| Cys Cys Glu Phe Cys Cys Asn Pro Ala Cys Gly Gly Cys | |
| Cys Cys Glu Trp Cys Cys Asn Pro Ala Cys Gly Gly Cys Tyr | |
| Cys Cys Glu Trp Cys Cys Asn Pro Ala Cys Gly Gly Cys | |
| Cys Cys Glu Leu Cys Cys Asn Pro Ala Cys Thr Ala Cys Tyr | |
| Cys Cys Glu Tyr Cys Cys Asn Pro Ala Cys Thr Ala Cys Tyr | |
| Cys Cys Glu Leu Cys Cys Asn Pro Ala Cys Thr Ala Cys | |
| Cys Cys Glu Tyr Cys Cys Asn Pro Ala Cys Thr Ala Cys | |
| Cys Cys Glu Trp Cys Cys Asn Pro Ala Cys Thr Ala Cys Tyr | |
| Cys Cys Glu Trp Cys Cys Asn Pro Ala Cys Thr Ala Cys | |
| Cys Cys Glu Phe Cys Cys Asn Pro Ala Cys Thr Ala Cys Tyr | |
| Cys Cys Glu Phe Cys Cys Asn Pro Ala Cys Thr Ala Cys | |
| Cys Cys Glu Leu Cys Cys Asn Pro Ala Cys Thr Gly Cys Ala | |
| Cys Cys Glu Leu Cys Cys Asn Pro Ala Cys Thr Gly Cys Val | |
| Cys Cys Glu Leu Cys Cys Asn Pro Ala Cys Thr Gly Cys Leu | |
| Cys Cys Glu Leu Cys Cys Asn Pro Ala Cys Thr Gly Cys Ile | |
| Cys Cys Glu Leu Cys Cys Asn Pro Ala Cys Thr Gly Cys Pro | |
| Cys Cys Glu Leu Cys Cys Asn Pro Ala Cys Thr Gly Cys Met | |
| Cys Cys Glu Leu Cys Cys Asn Pro Ala Cys Thr Gly Cys Phe | |
| Cys Cys Glu Leu Cys Cys Asn Pro Ala Cys Thr Gly Cys Trp | |
| Cys Cys Glu Leu Cys Cys Asn Pro Ala Cys Thr Gly Cys Gly | |
| Cys Cys Glu Leu Cys Cys Asn Pro Ala Cys Thr Gly Cys Ser | |
| Cys Cys Glu Leu Cys Cys Asn Pro Ala Cys Thr Gly Cys Thr | |
| Cys Cys Glu Leu Cys Cys Asn Pro Ala Cys Thr Gly Cys Cys | |
| Cys Cys Glu Leu Cys Cys Asn Pro Ala Cys Thr Gly Cys Asn | |
| Cys Cys Glu Leu Cys Cys Asn Pro Ala Cys Thr Gly Cys Gln | |
| Cys Cys Glu Leu Cys Cys Asn Pro Ala Cys Thr Gly Cys Asp | |
| Cys Cys Glu Leu Cys Cys Asn Pro Ala Cys Thr Gly Cys Glu | |
| Cys Cys Glu Leu Cys Cys Asn Pro Ala Cys Thr Gly Cys Lys | |
| Cys Cys Glu Leu Cys Cys Asn Pro Ala Cys Thr Gly Cys Arg | |
| Cys Cys Glu Leu Cys Cys Asn Pro Ala Cys Thr Gly Cys His | |
| Cys Cys Glu Tyr Cys Cys Asn Pro Ala Cys Thr Gly Cys Ala | |
| Cys Cys Glu Tyr Cys Cys Asn Pro Ala Cys Thr Gly Cys Val | |
| Cys Cys Glu Tyr Cys Cys Asn Pro Ala Cys Thr Gly Cys Leu | |
| Cys Cys Glu Tyr Cys Cys Asn Pro Ala Cys Thr Gly Cys Ile | |
| Cys Cys Glu Tyr Cys Cys Asn Pro Ala Cys Thr Gly Cys Pro | |
| Cys Cys Glu Tyr Cys Cys Asn Pro Ala Cys Thr Gly Cys Met | |
| Cys Cys Glu Tyr Cys Cys Asn Pro Ala Cys Thr Gly Cys Phe | |
| Cys Cys Glu Tyr Cys Cys Asn Pro Ala Cys Thr Gly Cys Trp | |
| Cys Cys Glu Tyr Cys Cys Asn Pro Ala Cys Thr Gly Cys Gly | |
| Cys Cys Glu Tyr Cys Cys Asn Pro Ala Cys Thr Gly Cys Ser | |
| Cys Cys Glu Tyr Cys Cys Asn Pro Ala Cys Thr Gly Cys Thr | |
| Cys Cys Glu Tyr Cys Cys Asn Pro Ala Cys Thr Gly Cys Cys | |
| Cys Cys Glu Tyr Cys Cys Asn Pro Ala Cys Thr Gly Cys Asn | |
| Cys Cys Glu Tyr Cys Cys Asn Pro Ala Cys Thr Gly Cys Gln | |
| Cys Cys Glu Tyr Cys Cys Asn Pro Ala Cys Thr Gly Cys Asp | |
| Cys Cys Glu Tyr Cys Cys Asn Pro Ala Cys Thr Gly Cys Glu | |
| Cys Cys Glu Tyr Cys Cys Asn Pro Ala Cys Thr Gly Cys Lys | |
| Cys Cys Glu Tyr Cys Cys Asn Pro Ala Cys Thr Gly Cys Arg | |
| Cys Cys Glu Tyr Cys Cys Asn Pro Ala Cys Thr Gly Cys His | |
| Cys Cys Ala Leu Cys Cys Asn Pro Ala Cys Thr Gly Cys Tyr | |
| Cys Cys Val Leu Cys Cys Asn Pro Ala Cys Thr Gly Cys Tyr | |
| Cys Cys Leu Leu Cys Cys Asn Pro Ala Cys Thr Gly Cys Tyr | |
| Cys Cys Ile Leu Cys Cys Asn Pro Ala Cys Thr Gly Cys Tyr | |
| Cys Cys Met Leu Cys Cys Asn Pro Ala Cys Thr Gly Cys Tyr | |
| Cys Cys Phe Leu Cys Cys Asn Pro Ala Cys Thr Gly Cys Tyr | |
| Cys Cys Trp Leu Cys Cys Asn Pro Ala Cys Thr Gly Cys Tyr | |
| Cys Cys Gly Leu Cys Cys Asn Pro Ala Cys Thr Gly Cys Tyr | |
| Cys Cys Ser Leu Cys Cys Asn Pro Ala Cys Thr Gly Cys Tyr | |
| Cys Cys Thr Leu Cys Cys Asn Pro Ala Cys Thr Gly Cys Tyr | |
| Cys Cys Cys Leu Cys Cys Asn Pro Ala Cys Thr Gly Cys Tyr | |
| Cys Cys Asn Leu Cys Cys Asn Pro Ala Cys Thr Gly Cys Tyr | |
| Cys Cys Gln Leu Cys Cys Asn Pro Ala Cys Thr Gly Cys Tyr | |
| Cys Cys Tyr Leu Cys Cys Asn Pro Ala Cys Thr Gly Cys Tyr | |
| Cys Cys Asp Leu Cys Cys Asn Pro Ala Cys Thr Gly Cys Tyr | |
| Cys Cys Lys Leu Cys Cys Asn Pro Ala Cys Thr Gly Cys Tyr | |
| Cys Cys Arg Leu Cys Cys Asn Pro Ala Cys Thr Gly Cys Tyr | |
| Cys Cys His Leu Cys Cys Asn Pro Ala Cys Thr Gly Cys Tyr | |
| Cys Cys Ala Leu Cys Cys Asn Pro Ala Cys Thr Gly Cys | |
| Cys Cys Val Leu Cys Cys Asn Pro Ala Cys Thr Gly Cys | |
| Cys Cys Leu Leu Cys Cys Asn Pro Ala Cys Thr Gly Cys | |
| Cys Cys Ile Leu Cys Cys Asn Pro Ala Cys Thr Gly Cys | |
| Cys Cys Met Leu Cys Cys Asn Pro Ala Cys Thr Gly Cys | |
| Cys Cys Phe Leu Cys Cys Asn Pro Ala Cys Thr Gly Cys | |
| Cys Cys Trp Leu Cys Cys Asn Pro Ala Cys Thr Gly Cys | |
| Cys Cys Gly Leu Cys Cys Asn Pro Ala Cys Thr Gly Cys | |
| Cys Cys Ser Leu Cys Cys Asn Pro Ala Cys Thr Gly Cys | |
| Cys Cys Thr Leu Cys Cys Asn Pro Ala Cys Thr Gly Cys | |
| Cys Cys Cys Leu Cys Cys Asn Pro Ala Cys Thr Gly Cys | |
| Cys Cys Asn Leu Cys Cys Asn Pro Ala Cys Thr Gly Cys | |
| Cys Cys Gln Leu Cys Cys Asn Pro Ala Cys Thr Gly Cys | |
| Cys Cys Tyr Leu Cys Cys Asn Pro Ala Cys Thr Gly Cys | |
| Cys Cys Asp Leu Cys Cys Asn Pro Ala Cys Thr Gly Cys | |
| Cys Cys Lys Leu Cys Cys Asn Pro Ala Cys Thr Gly Cys | |
| Cys Cys Arg Leu Cys Cys Asn Pro Ala Cys Thr Gly Cys | |
| Cys Cys His Leu Cys Cys Asn Pro Ala Cys Thr Gly Cys | |
| Cys Cys Ala Tyr Cys Cys Asn Pro Ala Cys Thr Gly Cys Tyr | |
| Cys Cys Val Tyr Cys Cys Asn Pro Ala Cys Thr Gly Cys Tyr | |
| Cys Cys Leu Tyr Cys Cys Asn Pro Ala Cys Thr Gly Cys Tyr | |
| Cys Cys Ile Tyr Cys Cys Asn Pro Ala Cys Thr Gly Cys Tyr | |
| Cys Cys Met Tyr Cys Cys Asn Pro Ala Cys Thr Gly Cys Tyr | |
| Cys Cys Phe Tyr Cys Cys Asn Pro Ala Cys Thr Gly Cys Tyr | |
| Cys Cys Trp Tyr Cys Cys Asn Pro Ala Cys Thr Gly Cys Tyr | |
| Cys Cys Gly Tyr Cys Cys Asn Pro Ala Cys Thr Gly Cys Tyr | |
| Cys Cys Ser Tyr Cys Cys Asn Pro Ala Cys Thr Gly Cys Tyr | |
| Cys Cys Thr Tyr Cys Cys Asn Pro Ala Cys Thr Gly Cys Tyr | |
| Cys Cys Cys Tyr Cys Cys Asn Pro Ala Cys Thr Gly Cys Tyr | |
| Cys Cys Asn Tyr Cys Cys Asn Pro Ala Cys Thr Gly Cys Tyr | |
| Cys Cys Gln Tyr Cys Cys Asn Pro Ala Cys Thr Gly Cys Tyr | |
| Cys Cys Tyr Tyr Cys Cys Asn Pro Ala Cys Thr Gly Cys Tyr | |
| Cys Cys Asp Tyr Cys Cys Asn Pro Ala Cys Thr Gly Cys Tyr | |
| Cys Cys Lys Tyr Cys Cys Asn Pro Ala Cys Thr Gly Cys Tyr | |
| Cys Cys Arg Tyr Cys Cys Asn Pro Ala Cys Thr Gly Cys Tyr | |
| Cys Cys His Tyr Cys Cys Asn Pro Ala Cys Thr Gly Cys Tyr | |
| Cys Cys Ala Tyr Cys Cys Asn Pro Ala Cys Thr Gly Cys | |
| Cys Cys Val Tyr Cys Cys Asn Pro Ala Cys Thr Gly Cys | |
| Cys Cys Leu Tyr Cys Cys Asn Pro Ala Cys Thr Gly Cys | |
| Cys Cys Ile Tyr Cys Cys Asn Pro Ala Cys Thr Gly Cys | |
| Cys Cys Met Tyr Cys Cys Asn Pro Ala Cys Thr Gly Cys | |
| Cys Cys Phe Tyr Cys Cys Asn Pro Ala Cys Thr Gly Cys | |
| Cys Cys Trp Tyr Cys Cys Asn Pro Ala Cys Thr Gly Cys | |
| Cys Cys Gly Tyr Cys Cys Asn Pro Ala Cys Thr Gly Cys | |
| Cys Cys Ser Tyr Cys Cys Asn Pro Ala Cys Thr Gly Cys | |
| Cys Cys Thr Tyr Cys Cys Asn Pro Ala Cys Thr Gly Cys | |
| Cys Cys Cys Tyr Cys Cys Asn Pro Ala Cys Thr Gly Cys | |
| Cys Cys Asn Tyr Cys Cys Asn Pro Ala Cys Thr Gly Cys | |
| Cys Cys Gln Tyr Cys Cys Asn Pro Ala Cys Thr Gly Cys | |
| Cys Cys Tyr Tyr Cys Cys Asn Pro Ala Cys Thr Gly Cys | |
| Cys Cys Asp Tyr Cys Cys Asn Pro Ala Cys Thr Gly Cys | |
| Cys Cys Lys Tyr Cys Cys Asn Pro Ala Cys Thr Gly Cys | |
| Cys Cys Arg Tyr Cys Cys Asn Pro Ala Cys Thr Gly Cys | |
| Cys Cys His Tyr Cys Cys Asn Pro Ala Cys Thr Gly Cys | |
| Cys Cys Glu Phe Cys Cys Ala Pro Ala Cys Thr Gly Cys Tyr | |
| Cys Cys Glu Phe Cys Cys Val Pro Ala Cys Thr Gly Cys Tyr | |
| Cys Cys Glu Phe Cys Cys Leu Pro Ala Cys Thr Gly Cys Tyr | |
| Cys Cys Glu Phe Cys Cys Ile Pro Ala Cys Thr Gly Cys Tyr | |
| Cys Cys Glu Phe Cys Cys Pro Pro Ala Cys Thr Gly Cys Tyr | |
| Cys Cys Glu Phe Cys Cys Met Pro Ala Cys Thr Gly Cys Tyr | |
| Cys Cys Glu Phe Cys Cys Phe Pro Ala Cys Thr Gly Cys Tyr | |
| Cys Cys Glu Phe Cys Cys Trp Pro Ala Cys Thr Gly Cys Tyr | |
| Cys Cys Glu Phe Cys Cys Gly Pro Ala Cys Thr Gly Cys Tyr | |
| Cys Cys Glu Phe Cys Cys Ser Pro Ala Cys Thr Gly Cys Tyr | |
| Cys Cys Glu Phe Cys Cys Thr Pro Ala Cys Thr Gly Cys Tyr | |
| Cys Cys Glu Phe Cys Cys Cys Pro Ala Cys Thr Gly Cys Tyr | |
| Cys Cys Glu Phe Cys Cys Gln Pro Ala Cys Thr Gly Cys Tyr | |
| Cys Cys Glu Phe Cys Cys Tyr Pro Ala Cys Thr Gly Cys Tyr | |
| Cys Cys Glu Phe Cys Cys Asp Pro Ala Cys Thr Gly Cys Tyr | |
| Cys Cys Glu Phe Cys Cys Glu Pro Ala Cys Thr Gly Cys Tyr | |
| Cys Cys Glu Phe Cys Cys Lys Pro Ala Cys Thr Gly Cys Tyr | |
| Cys Cys Glu Phe Cys Cys Arg Pro Ala Cys Thr Gly Cys Tyr | |
| Cys Cys Glu Phe Cys Cys His Pro Ala Cys Thr Gly Cys Tyr | |
| Cys Cys Glu Phe Cys Cys Ala Pro Ala Cys Thr Gly Cys | |
| Cys Cys Glu Phe Cys Cys Val Pro Ala Cys Thr Gly Cys | |
| Cys Cys Glu Phe Cys Cys Leu Pro Ala Cys Thr Gly Cys | |
| Cys Cys Glu Phe Cys Cys Ile Pro Ala Cys Thr Gly Cys | |
| Cys Cys Glu Phe Cys Cys Pro Pro Ala Cys Thr Gly Cys | |
| Cys Cys Glu Phe Cys Cys Met Pro Ala Cys Thr Gly Cys | |
| Cys Cys Glu Phe Cys Cys Phe Pro Ala Cys Thr Gly Cys | |
| Cys Cys Glu Phe Cys Cys Trp Pro Ala Cys Thr Gly Cys | |
| Cys Cys Glu Phe Cys Cys Gly Pro Ala Cys Thr Gly Cys | |
| Cys Cys Glu Phe Cys Cys Ser Pro Ala Cys Thr Gly Cys | |
| Cys Cys Glu Phe Cys Cys Thr Pro Ala Cys Thr Gly Cys | |
| Cys Cys Glu Phe Cys Cys Cys Pro Ala Cys Thr Gly Cys | |
| Cys Cys Glu Phe Cys Cys Gln Pro Ala Cys Thr Gly Cys | |
| Cys Cys Glu Phe Cys Cys Tyr Pro Ala Cys Thr Gly Cys | |
| Cys Cys Glu Phe Cys Cys Asp Pro Ala Cys Thr Gly Cys | |
| Cys Cys Glu Phe Cys Cys Glu Pro Ala Cys Thr Gly Cys | |
| Cys Cys Glu Phe Cys Cys Lys Pro Ala Cys Thr Gly Cys | |
| Cys Cys Glu Phe Cys Cys Arg Pro Ala Cys Thr Gly Cys | |
| Cys Cys Glu Phe Cys Cys His Pro Ala Cys Thr Gly Cys | |
| Cys Cys Glu Trp Cys Cys Ala Pro Ala Cys Thr Gly Cys Tyr | |
| Cys Cys Glu Trp Cys Cys Val Pro Ala Cys Thr Gly Cys Tyr | |
| Cys Cys Glu Trp Cys Cys Leu Pro Ala Cys Thr Gly Cys Tyr | |
| Cys Cys Glu Trp Cys Cys Ile Pro Ala Cys Thr Gly Cys Tyr | |
| Cys Cys Glu Trp Cys Cys Pro Pro Ala Cys Thr Gly Cys Tyr | |
| Cys Cys Glu Trp Cys Cys Met Pro Ala Cys Thr Gly Cys Tyr | |
| Cys Cys Glu Trp Cys Cys Phe Pro Ala Cys Thr Gly Cys Tyr | |
| Cys Cys Glu Trp Cys Cys Trp Pro Ala Cys Thr Gly Cys Tyr | |
| Cys Cys Glu Trp Cys Cys Gly Pro Ala Cys Thr Gly Cys Tyr | |
| Cys Cys Glu Trp Cys Cys Ser Pro Ala Cys Thr Gly Cys Tyr | |
| Cys Cys Glu Trp Cys Cys Thr Pro Ala Cys Thr Gly Cys Tyr | |
| Cys Cys Glu Trp Cys Cys Cys Pro Ala Cys Thr Gly Cys Tyr | |
| Cys Cys Glu Trp Cys Cys Gln Pro Ala Cys Thr Gly Cys Tyr | |
| Cys Cys Glu Trp Cys Cys Tyr Pro Ala Cys Thr Gly Cys Tyr | |
| Cys Cys Glu Trp Cys Cys Asp Pro Ala Cys Thr Gly Cys Tyr | |
| Cys Cys Glu Trp Cys Cys Glu Pro Ala Cys Thr Gly Cys Tyr | |
| Cys Cys Glu Trp Cys Cys Lys Pro Ala Cys Thr Gly Cys Tyr | |
| Cys Cys Glu Trp Cys Cys Arg Pro Ala Cys Thr Gly Cys Tyr | |
| Cys Cys Glu Trp Cys Cys His Pro Ala Cys Thr Gly Cys Tyr | |
| Cys Cys Glu Trp Cys Cys Ala Pro Ala Cys Thr Gly Cys | |
| Cys Cys Glu Trp Cys Cys Val Pro Ala Cys Thr Gly Cys | |
| Cys Cys Glu Trp Cys Cys Leu Pro Ala Cys Thr Gly Cys | |
| Cys Cys Glu Trp Cys Cys Ile Pro Ala Cys Thr Gly Cys | |
| Cys Cys Glu Trp Cys Cys Pro Pro Ala Cys Thr Gly Cys | |
| Cys Cys Glu Trp Cys Cys Met Pro Ala Cys Thr Gly Cys | |
| Cys Cys Glu Trp Cys Cys Phe Pro Ala Cys Thr Gly Cys | |
| Cys Cys Glu Trp Cys Cys Trp Pro Ala Cys Thr Gly Cys | |
| Cys Cys Glu Trp Cys Cys Gly Pro Ala Cys Thr Gly Cys | |
| Cys Cys Glu Trp Cys Cys Ser Pro Ala Cys Thr Gly Cys | |
| Cys Cys Glu Trp Cys Cys Thr Pro Ala Cys Thr Gly Cys | |
| Cys Cys Glu Trp Cys Cys Cys Pro Ala Cys Thr Gly Cys | |
| Cys Cys Glu Trp Cys Cys Gln Pro Ala Cys Thr Gly Cys | |
| Cys Cys Glu Trp Cys Cys Tyr Pro Ala Cys Thr Gly Cys | |
| Cys Cys Glu Trp Cys Cys Asp Pro Ala Cys Thr Gly Cys | |
| Cys Cys Glu Trp Cys Cys Glu Pro Ala Cys Thr Gly Cys | |
| Cys Cys Glu Trp Cys Cys Lys Pro Ala Cys Thr Gly Cys | |
| Cys Cys Glu Trp Cys Cys Arg Pro Ala Cys Thr Gly Cys | |
| Cys Cys Glu Trp Cys Cys His Pro Ala Cys Thr Gly Cys | |
| Cys Cys Glu Trp Cys Cys Asn Pro Ala Cys Thr Gly Cys Ala | |
| Cys Cys Glu Trp Cys Cys Asn Pro Ala Cys Thr Gly Cys Val | |
| Cys Cys Glu Trp Cys Cys Asn Pro Ala Cys Thr Gly Cys Leu | |
| Cys Cys Glu Trp Cys Cys Asn Pro Ala Cys Thr Gly Cys Ile | |
| Cys Cys Glu Trp Cys Cys Asn Pro Ala Cys Thr Gly Cys Pro | |
| Cys Cys Glu Trp Cys Cys Asn Pro Ala Cys Thr Gly Cys Met | |
| Cys Cys Glu Trp Cys Cys Asn Pro Ala Cys Thr Gly Cys Phe | |
| Cys Cys Glu Trp Cys Cys Asn Pro Ala Cys Thr Gly Cys Trp | |
| Cys Cys Glu Trp Cys Cys Asn Pro Ala Cys Thr Gly Cys Gly | |
| Cys Cys Glu Trp Cys Cys Asn Pro Ala Cys Thr Gly Cys Ser | |
| Cys Cys Glu Trp Cys Cys Asn Pro Ala Cys Thr Gly Cys Thr | |
| Cys Cys Glu Trp Cys Cys Asn Pro Ala Cys Thr Gly Cys Cys | |
| Cys Cys Glu Trp Cys Cys Asn Pro Ala Cys Thr Gly Cys Asn | |
| Cys Cys Glu Trp Cys Cys Asn Pro Ala Cys Thr Gly Cys Gln | |
| Cys Cys Glu Trp Cys Cys Asn Pro Ala Cys Thr Gly Cys Asp | |
| Cys Cys Glu Trp Cys Cys Asn Pro Ala Cys Thr Gly Cys Glu | |
| Cys Cys Glu Trp Cys Cys Asn Pro Ala Cys Thr Gly Cys Lys | |
| Cys Cys Glu Trp Cys Cys Asn Pro Ala Cys Thr Gly Cys Arg | |
| Cys Cys Glu Trp Cys Cys Asn Pro Ala Cys Thr Gly Cys His | |
| Cys Cys Glu Phe Cys Cys Asn Pro Ala Cys Thr Gly Cys Ala | |
| Cys Cys Glu Phe Cys Cys Asn Pro Ala Cys Thr Gly Cys Val | |
| Cys Cys Glu Phe Cys Cys Asn Pro Ala Cys Thr Gly Cys Leu | |
| Cys Cys Glu Phe Cys Cys Asn Pro Ala Cys Thr Gly Cys Ile | |
| Cys Cys Glu Phe Cys Cys Asn Pro Ala Cys Thr Gly Cys Pro | |
| Cys Cys Glu Phe Cys Cys Asn Pro Ala Cys Thr Gly Cys Met | |
| Cys Cys Glu Phe Cys Cys Asn Pro Ala Cys Thr Gly Cys Phe | |
| Cys Cys Glu Phe Cys Cys Asn Pro Ala Cys Thr Gly Cys Trp | |
| Cys Cys Glu Phe Cys Cys Asn Pro Ala Cys Thr Gly Cys Gly | |
| Cys Cys Glu Phe Cys Cys Asn Pro Ala Cys Thr Gly Cys Ser | |
| Cys Cys Glu Phe Cys Cys Asn Pro Ala Cys Thr Gly Cys Thr | |
| Cys Cys Glu Phe Cys Cys Asn Pro Ala Cys Thr Gly Cys Cys | |
| Cys Cys Glu Phe Cys Cys Asn Pro Ala Cys Thr Gly Cys Asn | |
| Cys Cys Glu Phe Cys Cys Asn Pro Ala Cys Thr Gly Cys Gln | |
| Cys Cys Glu Phe Cys Cys Asn Pro Ala Cys Thr Gly Cys Asp | |
| Cys Cys Glu Phe Cys Cys Asn Pro Ala Cys Thr Gly Cys Glu | |
| Cys Cys Glu Phe Cys Cys Asn Pro Ala Cys Thr Gly Cys Lys | |
| Cys Cys Glu Phe Cys Cys Asn Pro Ala Cys Thr Gly Cys Arg | |
| Cys Cys Glu Phe Cys Cys Asn Pro Ala Cys Thr Gly Cys His | |
| Cys Cys Ala Phe Cys Cys Asn Pro Ala Cys Thr Gly Cys Tyr | |
| Cys Cys Val Phe Cys Cys Asn Pro Ala Cys Thr Gly Cys Tyr | |
| Cys Cys Leu Phe Cys Cys Asn Pro Ala Cys Thr Gly Cys Tyr | |
| Cys Cys Ile Phe Cys Cys Asn Pro Ala Cys Thr Gly Cys Tyr | |
| Cys Cys Met Phe Cys Cys Asn Pro Ala Cys Thr Gly Cys Tyr | |
| Cys Cys Phe Phe Cys Cys Asn Pro Ala Cys Thr Gly Cys Tyr | |
| Cys Cys Trp Phe Cys Cys Asn Pro Ala Cys Thr Gly Cys Tyr | |
| Cys Cys Gly Phe Cys Cys Asn Pro Ala Cys Thr Gly Cys Tyr | |
| Cys Cys Ser Phe Cys Cys Asn Pro Ala Cys Thr Gly Cys Tyr | |
| Cys Cys Thr Phe Cys Cys Asn Pro Ala Cys Thr Gly Cys Tyr | |
| Cys Cys Cys Phe Cys Cys Asn Pro Ala Cys Thr Gly Cys Tyr | |
| Cys Cys Asn Phe Cys Cys Asn Pro Ala Cys Thr Gly Cys Tyr | |
| Cys Cys Gln Phe Cys Cys Asn Pro Ala Cys Thr Gly Cys Tyr | |
| Cys Cys Tyr Phe Cys Cys Asn Pro Ala Cys Thr Gly Cys Tyr | |
| Cys Cys Asp Phe Cys Cys Asn Pro Ala Cys Thr Gly Cys Tyr | |
| Cys Cys Lys Phe Cys Cys Asn Pro Ala Cys Thr Gly Cys Tyr | |
| Cys Cys Arg Phe Cys Cys Asn Pro Ala Cys Thr Gly Cys Tyr | |
| Cys Cys His Phe Cys Cys Asn Pro Ala Cys Thr Gly Cys Tyr | |
| Cys Cys Ala Phe Cys Cys Asn Pro Ala Cys Thr Gly Cys | |
| Cys Cys Val Phe Cys Cys Asn Pro Ala Cys Thr Gly Cys | |
| Cys Cys Leu Phe Cys Cys Asn Pro Ala Cys Thr Gly Cys | |
| Cys Cys Ile Phe Cys Cys Asn Pro Ala Cys Thr Gly Cys | |
| Cys Cys Met Phe Cys Cys Asn Pro Ala Cys Thr Gly Cys | |
| Cys Cys Phe Phe Cys Cys Asn Pro Ala Cys Thr Gly Cys | |
| Cys Cys Trp Phe Cys Cys Asn Pro Ala Cys Thr Gly Cys | |
| Cys Cys Gly Phe Cys Cys Asn Pro Ala Cys Thr Gly Cys | |
| Cys Cys Ser Phe Cys Cys Asn Pro Ala Cys Thr Gly Cys | |
| Cys Cys Thr Phe Cys Cys Asn Pro Ala Cys Thr Gly Cys | |
| Cys Cys Cys Phe Cys Cys Asn Pro Ala Cys Thr Gly Cys | |
| Cys Cys Asn Phe Cys Cys Asn Pro Ala Cys Thr Gly Cys | |
| Cys Cys Gln Phe Cys Cys Asn Pro Ala Cys Thr Gly Cys | |
| Cys Cys Tyr Phe Cys Cys Asn Pro Ala Cys Thr Gly Cys | |
| Cys Cys Asp Phe Cys Cys Asn Pro Ala Cys Thr Gly Cys | |
| Cys Cys Lys Phe Cys Cys Asn Pro Ala Cys Thr Gly Cys | |
| Cys Cys Arg Phe Cys Cys Asn Pro Ala Cys Thr Gly Cys | |
| Cys Cys His Phe Cys Cys Asn Pro Ala Cys Thr Gly Cys | |
| Cys Cys Ala Trp Cys Cys Asn Pro Ala Cys Thr Gly Cys Tyr | |
| Cys Cys Val Trp Cys Cys Asn Pro Ala Cys Thr Gly Cys Tyr | |
| Cys Cys Leu Trp Cys Cys Asn Pro Ala Cys Thr Gly Cys Tyr | |
| Cys Cys Ile Trp Cys Cys Asn Pro Ala Cys Thr Gly Cys Tyr | |
| Cys Cys Met Trp Cys Cys Asn Pro Ala Cys Thr Gly Cys Tyr | |
| Cys Cys Phe Trp Cys Cys Asn Pro Ala Cys Thr Gly Cys Tyr | |
| Cys Cys Trp Trp Cys Cys Asn Pro Ala Cys Thr Gly Cys Tyr | |
| Cys Cys Gly Trp Cys Cys Asn Pro Ala Cys Thr Gly Cys Tyr | |
| Cys Cys Ser Trp Cys Cys Asn Pro Ala Cys Thr Gly Cys Tyr | |
| Cys Cys Thr Trp Cys Cys Asn Pro Ala Cys Thr Gly Cys Tyr | |
| Cys Cys Cys Trp Cys Cys Asn Pro Ala Cys Thr Gly Cys Tyr | |
| Cys Cys Asn Trp Cys Cys Asn Pro Ala Cys Thr Gly Cys Tyr | |
| Cys Cys Gln Trp Cys Cys Asn Pro Ala Cys Thr Gly Cys Tyr | |
| Cys Cys Tyr Trp Cys Cys Asn Pro Ala Cys Thr Gly Cys Tyr | |
| Cys Cys Asp Trp Cys Cys Asn Pro Ala Cys Thr Gly Cys Tyr | |
| Cys Cys Lys Trp Cys Cys Asn Pro Ala Cys Thr Gly Cys Tyr | |
| Cys Cys Arg Trp Cys Cys Asn Pro Ala Cys Thr Gly Cys Tyr | |
| Cys Cys His Trp Cys Cys Asn Pro Ala Cys Thr Gly Cys Tyr | |
| Cys Cys Ala Trp Cys Cys Asn Pro Ala Cys Thr Gly Cys | |
| Cys Cys Val Trp Cys Cys Asn Pro Ala Cys Thr Gly Cys | |
| Cys Cys Leu Trp Cys Cys Asn Pro Ala Cys Thr Gly Cys | |
| Cys Cys Ile Trp Cys Cys Asn Pro Ala Cys Thr Gly Cys | |
| Cys Cys Met Trp Cys Cys Asn Pro Ala Cys Thr Gly Cys | |
| Cys Cys Phe Trp Cys Cys Asn Pro Ala Cys Thr Gly Cys | |
| Cys Cys Trp Trp Cys Cys Asn Pro Ala Cys Thr Gly Cys | |
| Cys Cys Gly Trp Cys Cys Asn Pro Ala Cys Thr Gly Cys | |
| Cys Cys Ser Trp Cys Cys Asn Pro Ala Cys Thr Gly Cys | |
| Cys Cys Thr Trp Cys Cys Asn Pro Ala Cys Thr Gly Cys | |
| Cys Cys Cys Trp Cys Cys Asn Pro Ala Cys Thr Gly Cys | |
| Cys Cys Asn Trp Cys Cys Asn Pro Ala Cys Thr Gly Cys | |
| Cys Cys Gln Trp Cys Cys Asn Pro Ala Cys Thr Gly Cys | |
| Cys Cys Tyr Trp Cys Cys Asn Pro Ala Cys Thr Gly Cys | |
| Cys Cys Asp Trp Cys Cys Asn Pro Ala Cys Thr Gly Cys | |
| Cys Cys Lys Trp Cys Cys Asn Pro Ala Cys Thr Gly Cys | |
| Cys Cys Arg Trp Cys Cys Asn Pro Ala Cys Thr Gly Cys | |
| Cys Cys His Trp Cys Cys Asn Pro Ala Cys Thr Gly Cys | |
| Cys Glu Leu Cys Ile Asn Val Ala Cys Thr Gly Cys | |
| Cys Glu Leu Cys Val Asn Val Ala Cys Thr Gly Cys | |
| Cys Ala Glu Leu Cys Cys Asn Pro Ala Cys | |
| Cys Cys Gly Leu Cys Cys Asn Pro Ala Cys Ala Gly Cys | |
| Cys Cys Gly Leu Cys Cys Tyr Pro Ala Cys Ala Gly Cys | |
| Cys Glu Leu Cys Cys Asn Pro Ala Cys Ala Gly Cys | |
| Cys Cys Asp Val Cys Cys Tyr Pro Ala Cys Thr Gly Cys | |
| Cys Cys Glu Leu Cys Cys Asn Pro Ala Cys Ala Gly Cys | |
| Cys Cys Glu Leu Cys Cys Tyr Pro Ala Cys Ala Gly Cys | |
| Cys Cys Glu Leu Cys Cys Asn Pro Ala Cys Thr Gly Cys | |
| Cys Cys Glu Leu Cys Cys Tyr Pro Ala Cys Thr Gly Cys | |
| Cys Cys Glu Leu Cys Cys Asn Pro Gly Cys Thr Gly Cys | |
| Cys Cys Glu Ala Cys Cys Asn Pro Ala Cys Thr Gly Cys | |
| Cys Cys Glu Lys Cys Cys Asn Pro Ala Cys Thr Gly Cys | |
| Cys Cys Glu Leu Cys Cys Asn Pro Ala Cys Thr Ala Cys | |
| Cys Cys Pro Leu Cys Cys Asn Pro Ala Cys Thr Gly Cys | |
| Ala Cys Glu Leu Cys Ala Asn Pro Ala Cys Thr Gly Cys | |
| Cys Cys Glu Leu Ala Cys Asn Pro Ala Cys Thr Gly Ala | |
| Cys Glu Leu Cys Ala Asn Pro Ala Cys Thr Gly Cys | |
| Cys Cys Glu Leu Ala Cys Asn Pro Ala Cys | |
| Cys Cys Asp Val Cys Cys Asn Pro Ala Cys Ala Gly Cys | |
| Cys Cys Asp Val Cys Cys Asn Pro Ala Cys Thr Gly Cys | |
| Cys Cys Asp Val Cys Cys Asn Pro Ala Cys Ala Gly Cys Tyr | |
| Cys Cys Asp Val Cys Cys Asn Pro Ala Cys Thr Gly Cys Tyr | |
| Cys Cys Glu Leu Cys Cys Tyr Pro Ala Cys Ala Gly Cys | |
| Cys Cys Ile Cys Cys Asn Pro Ala Cys Phe Gly Cys | |
| Cys Cys Asn Tyr Cys Cys Ser Pro Cys Gly Cys | |
| Cys Cys Asp Val Cys Cys Asn Pro Ala Cys Ala Gly Cys | (SEQ ID NO. ) |
| Cys Cys Asp Ala Cys Cys Asn Pro Ala Cys Ala Gly Cys | (SEQ ID NO. ) |
| Cys Cys Asp Cys Cys Cys Asn Pro Ala Cys Ala Gly Cys | (SEQ ID NO. ) |
| Cys Cys Asp Asp Cys Cys Asn Pro Ala Cys Ala Gly Cys | (SEQ ID NO. ) |
| Cys Cys Asp Glu Cys Cys Asn Pro Ala Cys Ala Gly Cys | (SEQ ID NO. ) |
| Cys Cys Asp Phe Cys Cys Asn Pro Ala Cys Ala Gly Cys | (SEQ ID NO. ) |
| Cys Cys Asp Gly Cys Cys Asn Pro Ala Cys Ala Gly Cys | (SEQ ID NO. ) |
| Cys Cys Asp His Cys Cys Asn Pro Ala Cys Ala Gly Cys | (SEQ ID NO. ) |
| Cys Cys Asp Ile Cys Cys Asn Pro Ala Cys Ala Gly Cys | (SEQ ID NO. ) |
| Cys Cys Asp Lys Cys Cys Asn Pro Ala Cys Ala Gly Cys | (SEQ ID NO. ) |
| Cys Cys Asp Leu Cys Cys Asn Pro Ala Cys Ala Gly Cys | (SEQ ID NO. ) |
| Cys Cys Asp Met Cys Cys Asn Pro Ala Cys Ala Gly Cys | (SEQ ID NO. ) |
| Cys Cys Asp Asn Cys Cys Asn Pro Ala Cys Ala Gly Cys | (SEQ ID NO. ) |
| Cys Cys Asp Pro Cys Cys Asn Pro Ala Cys Ala Gly Cys | (SEQ ID NO. ) |
| Cys Cys Asp Gln Cys Cys Asn Pro Ala Cys Ala Gly Cys | (SEQ ID NO. ) |
| Cys Cys Asp Arg Cys Cys Asn Pro Ala Cys Ala Gly Cys | (SEQ ID NO. ) |
| Cys Cys Asp Ser Cys Cys Asn Pro Ala Cys Ala Gly Cys | (SEQ ID NO. ) |
| Cys Cys Asp Thr Cys Cys Asn Pro Ala Cys Ala Gly Cys | (SEQ ID NO. ) |
| Cys Cys Asp Trp Cys Cys Asn Pro Ala Cys Ala Gly Cys | (SEQ ID NO. ) |
| Cys Cys Asp Tyr Cys Cys Asn Pro Ala Cys Ala Gly Cys | (SEQ ID NO. ) |
| Cys Cys Glu Ile Cys Cys Asn Pro Ala Cys Phe Gly Cys | (SEQ ID NO. ) |
| Cys Cys Glu Ala Cys Cys Asn Pro Ala Cys Phe Gly Cys | (SEQ ID NO. ) |
| Cys Cys Glu Cys Cys Cys Asn Pro Ala Cys Phe Gly Cys | (SEQ ID NO. ) |
| Cys Cys Glu Asp Cys Cys Asn Pro Ala Cys Phe Gly Cys | (SEQ ID NO. ) |
| Cys Cys Glu Glu Cys Cys Asn Pro Ala Cys Phe Gly Cys | (SEQ ID NO. ) |
| Cys Cys Glu Phe Cys Cys Asn Pro Ala Cys Phe Gly Cys | (SEQ ID NO. ) |
| Cys Cys Glu Gly Cys Cys Asn Pro Ala Cys Phe Gly Cys | (SEQ ID NO. ) |
| Cys Cys Glu His Cys Cys Asn Pro Ala Cys Phe Gly Cys | (SEQ ID NO. ) |
| Cys Cys Glu Lys Cys Cys Asn Pro Ala Cys Phe Gly Cys | (SEQ ID NO. ) |
| Cys Cys Glu Leu Cys Cys Asn Pro Ala Cys Phe Gly Cys | (SEQ ID NO. ) |
| Cys Cys Glu Met Cys Cys Asn Pro Ala Cys Phe Gly Cys | (SEQ ID NO. ) |
| Cys Cys Glu Asn Cys Cys Asn Pro Ala Cys Phe Gly Cys | (SEQ ID NO. ) |
| Cys Cys Glu Pro Cys Cys Asn Pro Ala Cys Phe Gly Cys | (SEQ ID NO. ) |
| Cys Cys Glu Gln Cys Cys Asn Pro Ala Cys Phe Gly Cys | (SEQ ID NO. ) |
| Cys Cys Glu Arg Cys Cys Asn Pro Ala Cys Phe Gly Cys | (SEQ ID NO. ) |
| Cys Cys Glu Ser Cys Cys Asn Pro Ala Cys Phe Gly Cys | (SEQ ID NO. ) |
| Cys Cys Glu Thr Cys Cys Asn Pro Ala Cys Phe Gly Cys | (SEQ ID NO. ) |
| Cys Cys Glu Val Cys Cys Asn Pro Ala Cys Phe Gly Cys | (SEQ ID NO. ) |
| Cys Cys Glu Trp Cys Cys Asn Pro Ala Cys Phe Gly Cys | (SEQ ID NO. ) |
| Cys Cys Glu Tyr Cys Cys Asn Pro Ala Cys Phe Gly Cys | (SEQ ID NO. ) |
| Cys Cys Glu Leu Cys Cys Asn Pro Ala Cys Ala Pro Cys | (SEQ ID NO. ) |
| Cys Cys Glu Ala Cys Cys Asn Pro Ala Cys Ala Pro Cys | (SEQ ID NO. ) |
| Cys Cys Glu Cys Cys Cys Asn Pro Ala Cys Ala Pro Cys | (SEQ ID NO. ) |
| Cys Cys Glu Asp Cys Cys Asn Pro Ala Cys Ala Pro Cys | (SEQ ID NO. ) |
| Cys Cys Glu Glu Cys Cys Asn Pro Ala Cys Ala Pro Cys | (SEQ ID NO. ) |
| Cys Cys Glu Phe Cys Cys Asn Pro Ala Cys Ala Pro Cys | (SEQ ID NO. ) |
| Cys Cys Glu Gly Cys Cys Asn Pro Ala Cys Ala Pro Cys | (SEQ ID NO. ) |
| Cys Cys Glu His Cys Cys Asn Pro Ala Cys Ala Pro Cys | (SEQ ID NO. ) |
| Cys Cys Glu Ile Cys Cys Asn Pro Ala Cys Ala Pro Cys | (SEQ ID NO. ) |
| Cys Cys Glu Lys Cys Cys Asn Pro Ala Cys Ala Pro Cys | (SEQ ID NO. ) |
| Cys Cys Glu Met Cys Cys Asn Pro Ala Cys Ala Pro Cys | (SEQ ID NO. ) |
| Cys Cys Glu Asn Cys Cys Asn Pro Ala Cys Ala Pro Cys | (SEQ ID NO. ) |
| Cys Cys Glu Pro Cys Cys Asn Pro Ala Cys Ala Pro Cys | (SEQ ID NO. ) |
| Cys Cys Glu Gln Cys Cys Asn Pro Ala Cys Ala Pro Cys | (SEQ ID NO. ) |
| Cys Cys Glu Arg Cys Cys Asn Pro Ala Cys Ala Pro Cys | (SEQ ID NO. ) |
| Cys Cys Glu Ser Cys Cys Asn Pro Ala Cys Ala Pro Cys | (SEQ ID NO. ) |
| Cys Cys Glu Thr Cys Cys Asn Pro Ala Cys Ala Pro Cys | (SEQ ID NO. ) |
| Cys Cys Glu Val Cys Cys Asn Pro Ala Cys Ala Pro Cys | (SEQ ID NO. ) |
| Cys Cys Glu Trp Cys Cys Asn Pro Ala Cys Ala Pro Cys | (SEQ ID NO. ) |
| Cys Cys Glu Tyr Cys Cys Asn Pro Ala Cys Ala Pro Cys | (SEQ ID NO. ) |
| Cys Cys Glu Leu Cys Cys Asn Pro Ala Cys Phe Gly Cys | (SEQ ID NO. ) |
| Cys Cys Glu Ala Cys Cys Asn Pro Ala Cys Phe Gly Cys | (SEQ ID NO. ) |
| Cys Cys Glu Cys Cys Cys Asn Pro Ala Cys Phe Gly Cys | (SEQ ID NO. ) |
| Cys Cys Glu Asp Cys Cys Asn Pro Ala Cys Phe Gly Cys | (SEQ ID NO. ) |
| Cys Cys Glu Glu Cys Cys Asn Pro Ala Cys Phe Gly Cys | (SEQ ID NO. ) |
| Cys Cys Glu Phe Cys Cys Asn Pro Ala Cys Phe Gly Cys | (SEQ ID NO. ) |
| Cys Cys Glu Gly Cys Cys Asn Pro Ala Cys Phe Gly Cys | (SEQ ID NO. ) |
| Cys Cys Glu His Cys Cys Asn Pro Ala Cys Phe Gly Cys | (SEQ ID NO. ) |
| Cys Cys Glu Ile Cys Cys Asn Pro Ala Cys Phe Gly Cys | (SEQ ID NO. ) |
| Cys Cys Glu Lys Cys Cys Asn Pro Ala Cys Phe Gly Cys | (SEQ ID NO. ) |
| Cys Cys Glu Met Cys Cys Asn Pro Ala Cys Phe Gly Cys | (SEQ ID NO. ) |
| Cys Cys Glu Asn Cys Cys Asn Pro Ala Cys Phe Gly Cys | (SEQ ID NO. ) |
| Cys Cys Glu Pro Cys Cys Asn Pro Ala Cys Phe Gly Cys | (SEQ ID NO. ) |
| Cys Cys Glu Gln Cys Cys Asn Pro Ala Cys Phe Gly Cys | (SEQ ID NO. ) |
| Cys Cys Glu Arg Cys Cys Asn Pro Ala Cys Phe Gly Cys | (SEQ ID NO. ) |
| Cys Cys Glu Ser Cys Cys Asn Pro Ala Cys Phe Gly Cys | (SEQ ID NO. ) |
| Cys Cys Glu Thr Cys Cys Asn Pro Ala Cys Phe Gly Cys | (SEQ ID NO. ) |
| Cys Cys Glu Val Cys Cys Asn Pro Ala Cys Phe Gly Cys | (SEQ ID NO. ) |
| Cys Cys Glu Trp Cys Cys Asn Pro Ala Cys Phe Gly Cys | (SEQ ID NO. ) |
| Cys Cys Glu Tyr Cys Cys Asn Pro Ala Cys Phe Gly Cys | (SEQ ID NO. ) |
| Cys Cys Glu Val Cys Cys Asn Pro Ala Cys Ala Gly Cys | (SEQ ID NO. ) |
| Cys Cys Glu Ala Cys Cys Asn Pro Ala Cys Ala Gly Cys | (SEQ ID NO. ) |
| Cys Cys Glu Cys Cys Cys Asn Pro Ala Cys Ala Gly Cys | (SEQ ID NO. ) |
| Cys Cys Glu Asp Cys Cys Asn Pro Ala Cys Ala Gly Cys | (SEQ ID NO. ) |
| Cys Cys Glu Glu Cys Cys Asn Pro Ala Cys Ala Gly Cys | (SEQ ID NO. ) |
| Cys Cys Glu Phe Cys Cys Asn Pro Ala Cys Ala Gly Cys | (SEQ ID NO. ) |
| Cys Cys Glu Gly Cys Cys Asn Pro Ala Cys Ala Gly Cys | (SEQ ID NO. ) |
| Cys Cys Glu His Cys Cys Asn Pro Ala Cys Ala Gly Cys | (SEQ ID NO. ) |
| Cys Cys Glu Ile Cys Cys Asn Pro Ala Cys Ala Gly Cys | (SEQ ID NO. ) |
| Cys Cys Glu Lys Cys Cys Asn Pro Ala Cys Ala Gly Cys | (SEQ ID NO. ) |
| Cys Cys Glu Leu Cys Cys Asn Pro Ala Cys Ala Gly Cys | (SEQ ID NO. ) |
| Cys Cys Glu Met Cys Cys Asn Pro Ala Cys Ala Gly Cys | (SEQ ID NO. ) |
| Cys Cys Glu Asn Cys Cys Asn Pro Ala Cys Ala Gly Cys | (SEQ ID NO. ) |
| Cys Cys Glu Pro Cys Cys Asn Pro Ala Cys Ala Gly Cys | (SEQ ID NO. ) |
| Cys Cys Glu Gln Cys Cys Asn Pro Ala Cys Ala Gly Cys | (SEQ ID NO. ) |
| Cys Cys Glu Arg Cys Cys Asn Pro Ala Cys Ala Gly Cys | (SEQ ID NO. ) |
| Cys Cys Glu Ser Cys Cys Asn Pro Ala Cys Ala Gly Cys | (SEQ ID NO. ) |
| Cys Cys Glu Thr Cys Cys Asn Pro Ala Cys Ala Gly Cys | (SEQ ID NO. ) |
| Cys Cys Glu Trp Cys Cys Asn Pro Ala Cys Ala Gly Cys | (SEQ ID NO. ) |
| Cys Cys Glu Tyr Cys Cys Asn Pro Ala Cys Ala Gly Cys | (SEQ ID NO. ) |
| Cys Cys Glu Leu Cys Cys Asn Pro Ala Cys Thr Gly Cys Tyr | (SEQ ID NO: ) |
| Cys Cys Glu Tyr Cys Cys Asn Pro Ala Cys Thr Gly Cys Tyr | (SEQ ID NO: ) |
| and | |
| Cys Cys Glu Leu Cys Cys Asn Pro Ala Cys Thr Gly Cys. | (SEQ ID NO: ) |

[0139] In some embodiments: D′ comprises an amino acid sequence selected from:

| | |
|---|---|
| Cys Cys Glu Ala Cys Cys Asn Pro Ala Cys Thr Gly Cys | (SEQ ID NO: ) |
| Cys Cys Glu Arg Cys Cys Asn Pro Ala Cys Thr Gly Cys | (SEQ ID NO: ) |
| Cys Cys Glu Asn Cys Cys Asn Pro Ala Cys Thr Gly Cys | (SEQ ID NO: ) |
| Cys Cys Glu Asp Cys Cys Asn Pro Ala Cys Thr Gly Cys | (SEQ ID NO: ) |
| Cys Cys Glu Cys Cys Cys Asn Pro Ala Cys Thr Gly Cys | (SEQ ID NO: ) |
| Cys Cys Glu Gln Cys Cys Asn Pro Ala Cys Thr Gly Cys | (SEQ ID NO: ) |
| Cys Cys Glu Glu Cys Cys Asn Pro Ala Cys Thr Gly Cys | (SEQ ID NO: ) |
| Cys Cys Glu Gly Cys Cys Asn Pro Ala Cys Thr Gly Cys | (SEQ ID NO: ) |
| Cys Cys Glu His Cys Cys Asn Pro Ala Cys Thr Gly Cys | (SEQ ID NO: ) |
| Cys Cys Glu Ile Cys Cys Asn Pro Ala Cys Thr Gly Cys | (SEQ ID NO: ) |
| Cys Cys Glu Lys Cys Cys Asn Pro Ala Cys Thr Gly Cys | (SEQ ID NO: ) |
| Cys Cys Glu Met Cys Cys Asn Pro Ala Cys Thr Gly Cys | (SEQ ID NO: ) |
| Cys Cys Glu Phe Cys Cys Asn Pro Ala Cys Thr Gly Cys | (SEQ ID NO: ) |
| Cys Cys Glu Pro Cys Cys Asn Pro Ala Cys Thr Gly Cys | (SEQ ID NO: ) |
| Cys Cys Glu Ser Cys Cys Asn Pro Ala Cys Thr Gly Cys | (SEQ ID NO: ) |
| Cys Cys Glu Thr Cys Cys Asn Pro Ala Cys Thr Gly Cys | (SEQ ID NO: ) |
| Cys Cys Glu Trp Cys Cys Asn Pro Ala Cys Thr Gly Cys | (SEQ ID NO: ) |
| Cys Cys Glu Val Cys Cys Asn Pro Ala Cys Thr Gly Cys | (SEQ ID NO: ) |
| Cys Cys Glu Tyr Cys Cys Asn Pro Ala Cys Thr Gly Cys | (SEQ ID NO: ) |
| Cys Cys Glu Leu Cys Cys Asn Pro Ala Cys Thr Gly Cys | (SEQ ID NO: ) |
| Cys Cys Glu Ala Cys Cys Asn Pro Ala Cys Thr Gly Cys Tyr | (SEQ ID NO: ) |
| Cys Cys Glu Arg Cys Cys Asn Pro Ala Cys Thr Gly Cys Tyr | (SEQ ID NO: ) |
| Cys Cys Glu Asn Cys Cys Asn Pro Ala Cys Thr Gly Cys Tyr | (SEQ ID NO: ) |
| Cys Cys Glu Asp Cys Cys Asn Pro Ala Cys Thr Gly Cys Tyr | (SEQ ID NO: ) |
| Cys Cys Glu Cys Cys Cys Asn Pro Ala Cys Thr Gly Cys Tyr | (SEQ ID NO: ) |
| Cys Cys Glu Gln Cys Cys Asn Pro Ala Cys Thr Gly Cys Tyr | (SEQ ID NO: ) |
| Cys Cys Glu Glu Cys Cys Asn Pro Ala Cys Thr Gly Cys Tyr | (SEQ ID NO: ) |
| Cys Cys Glu Gly Cys Cys Asn Pro Ala Cys Thr Gly Cys Tyr | (SEQ ID NO: ) |
| Cys Cys Glu His Cys Cys Asn Pro Ala Cys Thr Gly Cys Tyr | (SEQ ID NO: ) |
| Cys Cys Glu Ile Cys Cys Asn Pro Ala Cys Thr Gly Cys Tyr | (SEQ ID NO: ) |
| Cys Cys Glu Lys Cys Cys Asn Pro Ala Cys Thr Gly Cys Tyr | (SEQ ID NO: ) |
| Cys Cys Glu Met Cys Cys Asn Pro Ala Cys Thr Gly Cys Tyr | (SEQ ID NO: ) |
| Cys Cys Glu Phe Cys Cys Asn Pro Ala Cys Thr Gly Cys Tyr | (SEQ ID NO: ) |
| Cys Cys Glu Pro Cys Cys Asn Pro Ala Cys Thr Gly Cys Tyr | (SEQ ID NO: ) |
| Cys Cys Glu Ser Cys Cys Asn Pro Ala Cys Thr Gly Cys Tyr | (SEQ ID NO: ) |
| Cys Cys Glu Thr Cys Cys Asn Pro Ala Cys Thr Gly Cys Tyr | (SEQ ID NO: ) |
| Cys Cys Glu Trp Cys Cys Asn Pro Ala Cys Thr Gly Cys Tyr | (SEQ ID NO: ) |
| Cys Cys Glu Val Cys Cys Asn Pro Ala Cys Thr Gly Cys Tyr | (SEQ ID NO: ) |
| Cys Cys Glu Tyr Cys Cys Asn Pro Ala Cys Thr Gly Cys Tyr | (SEQ ID NO: 3) |
| Cys Cys Glu Leu Cys Cys Asn Pro Ala Cys Thr Gly Cys Tyr | (SEQ ID NO: ) |

[0140] In other embodiments: E′ is missing; A′ is an amino acid sequence comprising a pre sequence depicted in FIG. 21; B′ is an amino acid sequence comprising a pro sequence depicted in FIG. 21; C′ is an amino acid sequence comprising an N-terminal non-core sequence depicted in FIG. 21; A′ is an amino acid sequence consisting of a pre sequence depicted in FIG. 21; B′ is an amino acid sequence consisting of a pro sequence depicted in FIG. 21; C′ is an amino acid sequence consisting of an N-terminal non-core sequence depicted in FIG. 21; A′ is missing; A′ is missing and E′ is missing; C′-D′-E′ comprises a processed active peptide sequence depicted in FIG. 21; D′ comprises an active core sequence; and the active core sequence comprises an active core sequence depicted in FIG. 21.

[0141] The invention includes methods for treating various gastrointestinal disorders by administering a peptide that acts as a partial or complete agonist of the GC-C receptor. The peptide includes at least six cysteines that can form three disulfide bonds. In certain embodiments the disulfide bonds are replaced by other covalent cross-links and in some cases the cysteines are substituted by other residues to provide for alternative covalent cross-links. The peptides may also include at least one trypsin or chymotrypsin cleavage site and/or an amino or carboxy-terminal analgesic peptide or small molecule, e.g., AspPhe or some other analgesic peptide. When present within the peptide, the analgesic peptide or small molecule may be preceded by a chymotrypsin or trypsin cleavage site that allows release of the analgesic peptide or small molecule. The peptides and methods of the invention are also useful for treating pain and inflammation associated with various disorders, including gastrointestinal disorders. Certain peptides include a functional chymotrypsin or trypsin cleavage site located so as to allow inactivation of the peptide upon cleavage. Certain peptides having a functional cleavage site undergo cleavage and gradual inactivation in the digestive tract, and this is desirable in some circumstances. In certain peptides, a functional chymotrypsin site is altered, increasing the stability of the peptide in vivo.

[0142] The invention includes: a method for increasing intestinal motility comprising administering a GC-C receptor agonist, e.g., a peptide described herein, to a patient in need thereof.

[0143] The invention includes a method treating a disorder associated with reduced gastrointestinal transit rates or reduced gastrointestinal motility comprising administering a GC-C receptor agonist, e.g., a peptide described herein, to a patient in need thereof.

[0144] The invention also includes a method treating a gastrointestinal hypomotility disorder comprising administering a GC-C receptor agonist, e.g., a peptide described herein, to a patient in need thereof.

[0145] The disorders which can be treated by administering a GC-C receptor agonist include constipation, constipation dominant irritable bowel syndrome and pelvic floor dyssynergia.

[0146] The invention features a method treating a non-inflammatory gastrointestinal disorder comprising administering a GC-C receptor agonist, e.g., a peptide described herein, to a patient in need thereof.

[0147] The invention includes a method treating a gastrointestinal disorder other than Crohn's disease and ulcerative colitis comprising administering a GC-C receptor agonist to a patient in need thereof.

[0148] The invention includes methods for treating other disorders such as congestive heart failure and benign prostatic hyperplasia by administering a peptide or small molecule (parenterally or orally) that acts as an agonist of the GC-C receptor. Such agents can be used in combination with natriuretic peptides (e.g., atrial natriuretic peptide, brain natriuretic peptide or C-type natriuretic peptide), a diuretic, or an inhibitor of angiotensin converting enzyme.

[0149] The invention features methods and compositions for increasing intestinal motility. Intestinal motility involves spontaneous coordinated dissentions and contractions of the stomach, intestines, colon and rectum to move food through the gastrointestinal tract during the digestive process.

[0150] In certain embodiments the patient has been diagnosed as suffering from IBS according to the Rome criteria. In certain embodiments the patient is female.

[0151] In certain embodiments the peptides include either one or two or more contiguous negatively charged amino acids (e.g., Asp or Glu) or one or two or more contiguous positively charged residues (e.g., Lys or Arg) or one or two or more contiguous positively or negatively charged amino acids at the carboxy terminus. In these embodiments all of the flanking amino acids at the carboxy terminus are either positively or negatively charged. In other embodiments the carboxy terminal charged amino acids are preceded by a Leu. For example, any of the following amino acid sequences can be added to the carboxy terminus of the peptide: Asp; Asp Lys; Lys Lys Lys Lys Lys Lys; Asp Lys Lys Lys Lys Lys Lys; Leu Lys Lys; and Leu Asp. It is also possible to simply add Leu at the carboxy terminus.

[0152] In a first aspect, the invention features a peptide comprising, consisting of, or consisting essentially of the amino acid sequence (I):

(SEQ ID NO: 1)

Xaa₁ Xaa₂ Xaa₃ Xaa₄ Xaa₅ Cys₆ Cys₇ Xaa₈ Xaa₉ Cys₁₀
Cys₁₁ Xaa₁₂ Xaa₁₃ Xaa₁₄ Cys₁₅ Xaa₁₆ Xaa₁₇ Cys₁₈
Xaa₁₉ Xaa₂₀ Xaa₂₁

wherein Xaa₁, Xaa₂, Xaa₃, Xaa₄, Xaa₅, Xaa₈, Xaa₉, Xaa₁₂, Xaa₁₃, Xaa₁₄, Xaa₁₆, Xaa₁₇, Xaa₁₉, Xaa₂₀ and Xaa₂₁ are any amino acid, e.g., Ala, Arg, Asn, Asp, Cys, Gln, Glu, Gly, His, Ile, Leu, Lys, Met, Phe, Pro, Ser, Thr, Trp, Tyr, and Val. In some embodiments, of SEQ ID NO:1, the sequence Xaa₁ Xaa₂ Xaa₃ Xaa₄ Xaa₅ is missing. In some embodiments, the sequence Xaa₁₉ Xaa₂₀ Xaa₂₁ is missing or the sequence Xaa₂₀ Xaa₂₁ is missing and Xaa₁₉ is Tyr. In some cases Xaa₁ Xaa₂ Xaa₃ Xaa₄ Xaa₅ is missing, the sequence Xaa₂₀ Xaa₂₁ is missing and Xaa₁₉ is Tyr.

[0153] In some embodiments of SEQ ID NO: 1: Xaa₁ Xaa₂ Xaa₃ Xaa₄ Xaa₅ is Asn Ser Ser Asn Tyr or is missing or Xaa₁ Xaa₂ Xaa₃ Xaa₄ is missing.

[0154] In certain embodiments of SEQ ID NO: 1: Xaa₈, Xaa₉, Xaa₁₂, Xaa₁₄, Xaa₁₆, Xaa₁₇, and Xaa₁₉ can be any amino acid. In certain embodiments Xaa₈, Xaa₉, Xaa₁₂, Xaa₁₄, Xaa₁₆, Xaa₁₇, and Xaa₁₉ can be any natural or non-natural amino acid or amino acid analog.

[0155] In certain embodiments, the peptide does not include the sequence of E. coli ST peptide. In other embodiment, the peptide does not include the sequence of any of the peptides in Table 1, below.

[0156] In certain embodiments of SEQ ID NO: 1: Xaa₅ is Asn, Trp, Tyr, Asp, or Phe. In other embodiments, Xaa₅ can also be Thr or Ile. In other embodiments Xaa₅ is Tyr, Asp or Trp. In certain embodiments Xaa₅ is Asn, Trp, Tyr, Asp, Ile, Thr or Phe. In certain embodiments Xaa₅ is Asn.

[0157] In some embodiments of SEQ ID NO: 1: Xaa₈ is Glu, Asp, Gln, Gly or Pro. In other embodiments Xaa₈ is Glu. In other embodiments Xaa₈ is Glu or Asp. In others it is Asn, Glu, or Asp. In others it is Glu, His, Lys, Gln, Asn, or Asp. In others it is Glu, His, Gln, Asn, or Asp. In others it is Glu, Asn, His, Gln, Lys, Asp or Ser. In still others it is Pro. In certain embodiments it is any natural or non-natural amino acid or amino acid analog.

[0158] In some embodiments of SEQ ID NO: 1: Xaa₉ is Leu, Ile, Val, Ala, Lys, Arg, Trp, Tyr or Phe. In some embodiments Xaa₉ is Leu, Ile, Val, Lys, Arg, Trp, Tyr or Phe. In others it is Leu, Ile, Val, Trp, Tyr or Phe. In others it is Leu, Ile or Val. In others it is Trp, Tyr or Phe. In others it is Leu, Ile, Lys, Arg, Trp, Tyr, or Phe. In others it is Leu, Val, Ile, or Met. In others it is Leu or Phe. In others it is Leu, Phe, or Tyr. In others it is Tyr, Phe or His. In others it is Phe, His, Trp, or Tyr. In certain embodiments, Xaa₉ is not Leu. In others it is Tyr.

[0159] In other embodiments it is any natural or non-natural aromatic amino acid or amino acid analog. In certain embodiments it is any natural or non-natural amino acid or amino acid analog.

[0160] In certain embodiments of SEQ ID NO: 1: Xaa₁₂ is Asn, Tyr, Asp or Ala. In others it is Asn. In others it is Asn, Met, Arg, Lys, His, or Gln. In others it is Asn, Lys, His, or Gln. In others it is Asn, Asp, Glu or Gln. In others it is Asn, Thr, Ser, Arg, Lys, Gln, or His. In others it is Asn, Ser, or His. In certain embodiments it is any natural or non-natural amino acid or amino acid analog.

[0161] In certain embodiments of SEQ ID NO: 1: Xaa₁₃ is Ala, Pro or Gly. In others it is Pro or Gly. In others it is Pro and in still others it is Gly.

[0162] In certain embodiments of SEQ ID NO: 1: Xaa₁₄ is Ala, Leu, Ser, Gly, Val, Glu, Gln, Ile, Leu, Thr, Lys, Arg, or Asp. In others it is Ala or Gly. In others it is Val or Ala. In others it is Ala or Thr. In others it is Ala. In others it is Val, Gln, Asn, Glu, Asp, Thr, or Ala. In others it is Gly, Cys or Ser. In still others it is Thr. In certain embodiments it is any natural or non-natural amino acid or amino acid analog.

[0163] In certain embodiments of SEQ ID NO: 1: Xaa₁₆ is Thr, Ala, Asn, Lys, Arg, Trp, Gly or Val. In others it is Thr, Ala, Asn, Lys, Arg or Trp. In others it is Thr, Ala, Lys, Arg or Trp. In certain embodiments it is Thr, Ala or Trp. In others it is Thr. In certain embodiments it is Trp, Tyr or Phe. In certain embodiments it is Thr or Ala. In certain embodiments it is Val. In certain embodiments it is Gly. In others it is Thr, Ser, Met or Val. In others it is Val, Ala, or Thr. In others it is Ile, Val, Lys, Asn, Glu, Asp, or Thr. In certain embodiments it is any natural or non-natural amino acid or amino acid analog. In certain embodiments it is any natural or non-natural non-aromatic amino acid or amino acid analog.

[0164] In certain embodiments of SEQ ID NO: 1: Xaa₁₇ is Gly, Pro or Ala. In certain embodiments it is Gly. In certain embodiments it is Ala. In others it is Gly or Ala. In others it is Gly, Asn, Ser or Ala. In others it is Asn, Glu, Asp, Thr, Ala, Ser, or Gly. In others it is Asp, Ala, Ser, or Gly. In certain embodiments it is any natural or non-natural amino acid or amino acid analog.

[0165] In certain embodiments of SEQ ID NO: 1: Xaa₁₉ is Trp, Tyr, Phe, Asn, Ile, Val, His, Leu, or Arg. In certain embodiments it is Trp, Tyr, Asn or Leu. In certain embodiments it is Trp, Tyr or Phe. In others it is Tyr, Phe or His. In others it is Tyr or Trp. In others it is Tyr. In certain embodiments it is Leu, Ile or Val. In certain embodiments it is His. In certain embodiments it is Trp, Tyr, Phe, Asn, Ile, Val, His or Leu. In certain embodiments it is Trp, Tyr, Phe or Leu. In certain embodiments it is Tyr or Leu. In certain embodiments it is Lys or Arg. In certain embodiments it is any amino acid other than Pro, Arg, Lys, Asp or Glu. In certain embodiments it is any amino acid other than Pro. In certain embodiments it is any natural or non-natural amino acid or amino acid analog. In certain embodiments it is missing.

[0166] In certain embodiments of SEQ ID NO: 1: Xaa₂₀ is Asp or Asn. In certain embodiments Xaa₂₀ Xaa₂₁ is AspPhe or is missing or Xaa₂₀ is Asn or Glu and Xaa₂₁ is missing or Xaa₁₉ Xaa₂₀ Xaa₂₁ is missing. In certain embodiments, the invention features, a purified polypeptide comprising the amino acid sequence (II):

(SEQ ID NO: 2)

Xaa₁ Xaa₂ Xaa₃ Xaa₄ Xaa₅ Cys₆ Cys₇ Xaa₈ Xaa₉ Cys₁₀
Cys₁₁ Asn₁₂ Pro₁₃ Ala₁₄ Cys₁₅ Xaa₁₆ Gly₁₇ Cys₁₈
Xaa₁₉ Xaa₂₀ Xaa₂₁

wherein Xaa₁ Xaa₂ Xaa₃ Xaa₄ Xaa₅ is Asn Ser Ser Asn Tyr or is missing or Xaa₁ Xaa₂ Xaa₃ Xaa₄ is missing and Xaa₅ is Asn;

[0167] Xaa₈ is Glu or Asp;

[0168] Xaa₉ is Leu, Ile, Val, Trp, Tyr or Phe;

[0169] Xaa₁₆ is Thr, Ala, Trp;

[0170] Xaa₁₉ is Trp, Tyr, Phe or Leu or is missing; and Xaa₂₀ Xaa₂₁ is AspPhe.

[0171] In various embodiments of SEQ ID NO:2: Xaa₉ is Leu, Ile or Val and Xaa₁₆ is Trp, Tyr or Phe; Xaa₉ is Trp, Tyr or Phe, and Xaa₁₆ is Thr or Ala; Xaa₁₉ is Trp, Tyr, Phe and Xaa₂₀ Xaa₂₁ is AspPhe; and Xaa₁ Xaa₂ Xaa₃ Xaa₄ is missing and Xaa₅ is Asn; the peptide comprises fewer than 50, 40, 30 or 25 amino acids; or fewer than five amino acids precede Cys₆.

[0172] In certain embodiments the peptide includes a peptide comprising or consisting of the amino acid sequence of SEQ ID NO:2 wherein Xaa₉ is any amino acid: wherein Xaa₉ is any amino acid other than Leu; wherein Xaa₉ is selected from Phe, Trp and Tyr; wherein Xaa₉ is selected from any other natural or non-natural aromatic amino acid; wherein Xaa₉ is Tyr; wherein Xaa₉ is Phe; wherein Xaa₉ is Trp; wherein Xaa₁ Xaa₂ Xaa₃ Xaa₄ Xaa₅ is Asn Ser Ser Asn Tyr; wherein Xaa₁, Xaa₂, Xaa₃, Xaa₄, and Xaa₅ are missing; wherein Xaa₁, Xaa₂, Xaa₃ and Xaa₄ are missing; wherein Xaa₁, Xaa₂ and Xaa₃ are missing; wherein Xaa₁ and Xaa₂ are missing; wherein Xaa₁ is missing; wherein Xaa₂₀ Xaa₂₁ is AspPhe or is missing or Xaa₂₀ is Asn or Glu and Xaa₂₁ is missing or Xaa₁₉ Xaa₂₀ Xaa₂₁ is missing; wherein Xaa₁ Xaa₂ Xaa₃ Xaa₄ Xaa₅ and Tyr Xaa₂₀ Xaa₂₁ are missing.

[0173] In the case of a peptide comprising the sequence of SEQ ID NO:1 wherein: Xaa₁ Xaa₂ Xaa₃ Xaa₄ Xaa₅ is missing and/or the sequence Xaa₁₉ Xaa₂₀ Xaa₂₁ is missing, the peptide can still contain additional carboxyterminal or amino terminal amino acids or both. In the case of peptides missing one or more terminal amino acids such as Xaa₁ or Xaa₂₁, the peptide can still contain additional carboxyterminal or amino terminal amino acids or both.

[0174] In certain embodiments, the peptide includes disulfide bonds between Cys₆ and Cys₁₁, between Cys₇ and Cys₁₅ and between Cys₁₀ and Cys₁₆. In other embodiments, the peptide is a reduced peptide having no disulfide bonds. In still other embodiments the peptide has one or two disulfide bonds chosen from: a disulfide bond between Cys₆ and Cys₁₁, a disulfide bond between Cys₇ and Cys₁₅ and a disulfide bond between Cys₁₀ and Cys₁₆.

[0175] In certain embodiments, one or more amino acids can be replaced by a non-naturally occurring amino acid or a naturally or non-naturally occurring amino acid analog. In certain embodiments, one or more L-amino acids can be substituted with a D-amino acid. There are many amino acids beyond the standard 20 amino acids (Ala, Arg, Asn, Asp, Cys, Gln, Glu, Gly, His, Ile, Leu, Lys, Met, Phe, Pro, Ser, Thr, Trp, Tyr, and Val). Some are naturally-occurring others are not (see, for example, Hunt, The Non-Protein Amino Acids: In Chemistry and Biochemistry of the Amino Acids, Barrett, Chapman and Hall, 1985). For example, an aromatic amino acid can be replaced by 3,4-dihydroxy-L-phenylalanine, 3-iodo-L-tyrosine, triiodothyronine, L-thyroxine, phenylglycine (Phg) or nor-tyrosine (norTyr). Phg and norTyr and other amino acids including Phe and Tyr can be substituted by, e.g., a halogen, —CH₃, —OH, —CH₂NH₃, —C(O)H, —CH₂CH₃, —CN, —CH₂CH₂CH₃, —SH, or another group. Any amino acid can be substituted by the D-form of the amino acid.

[0176] With regard to non-naturally occurring amino acids or naturally and non-naturally occurring amino acid analogs, a number of substitutions in the peptide of formula I or the peptide of formula II are possible alone or in combination.

[0177] Xaa₈ can be replaced by gamma-Hydroxy-Glu or gamma-Carboxy-Glu.

[0178] Xaa₉ can be replaced by an alpha substituted amino acid such as L-alpha-methylphenylalanine or by analogues such as: 3-Amino-Tyr; Tyr(CH₃); Tyr(PO₃(CH₃)₂); Tyr(SO₃H); beta-Cyclohexyl-Ala; beta-(1-Cyclopentenyl)-Ala; beta-Cyclopentyl-Ala; beta-Cyclopropyl-Ala; beta-Quinolyl-Ala; beta-(2-Thiazolyl)-Ala; beta-(Triazole-1-yl)-Ala; beta-(2-Pyridyl)-Ala; beta-(3-Pyridyl)-Ala; Amino-Phe; Fluoro-Phe; Cyclohexyl-Gly; tBu-Gly; beta-(3-benzothienyl)-Ala; beta-(2-thienyl)-Ala; 5-Methyl-Trp; and 4-Methyl-Trp.

[0179] Xaa₁₃ can be an N(alpha)-C(alpha) cyclized amino acid analogues with the structure:

[chemical structure]

[0180] Xaa₁₃ can also be homopro (L-pipecolic acid); hydroxy-Pro; 3,4-Dehydro-Pro; 4-fluoro-Pro; or alpha-methyl-Pro.

[chemical structure]

[0181] When Xaa₁₃ is Gly, Ala, Leu or Val, Xaa₁₄ can be:

[0182] Xaa₁₄ can also be an alpha-substituted or N-methylated amino acid such as alpha-amino isobutyric acid (aib), L/D-alpha-ethylalanine (L/D-isovaline), L/D-methylvaline, or L/D-alpha-methylleucine or a non-natural amino acid such as beta-fluoro-Ala.

[0183] Xaa₁₇ can be alpha-amino isobutyric acid (aib) or L/D-alpha-ethylalanine (L/D-isovaline).

[0184] Further examples of unnatural amino acids include: an unnatural analogue of tyrosine; an unnatural analogue of glutamine; an unnatural analogue of phenylalanine; an unnatural analogue of serine; an unnatural analogue of threonine; an alkyl, aryl, acyl, azido, cyano, halo, hydrazine, hydrazide, hydroxyl, alkenyl, alkynl, ether, thiol, sulfonyl, seleno, ester, thioacid, borate, boronate, phospho, phosphono, phosphine, heterocyclic, enone, imine, aldehyde, hydroxylamine, keto, or amino substituted amino acid, or any combination thereof, an amino acid with a photoactivatable cross-linker; a spin-labeled amino acid; a fluorescent amino acid; an amino acid with a novel functional group; an amino acid that covalently or noncovalently interacts with another molecule; a metal binding amino acid; an amino acid that is amidated at a site that is not naturally amidated, a metal-containing amino acid; a radioactive amino acid; a photocaged and/or photoisomerizable amino acid; a biotin or biotin-analogue containing amino acid; a glycosylated or carbohydrate modified amino acid; a keto containing amino acid; amino acids comprising polyethylene glycol or polyether; a heavy atom substituted amino acid (e.g., an amino acid containing deuterium, tritium, ¹³C, ¹⁵N, or ¹⁸O); a chemically cleavable or photocleavable amino acid; an amino acid with an elongated side chain; an amino acid containing a toxic group; a sugar substituted amino acid, e.g., a sugar substituted serine or the like; a carbon-linked sugar-containing amino acid; a redox-active amino acid; an α-hydroxy containing acid; an amino thio acid containing amino acid; an α,αdisubstituted amino acid; a β-amino acid; a cyclic amino acid other than proline; an O-methyl-L-tyrosine; an L-3-(2-naphthyl)alanine; a 3-methyl-phenylalanine; a p-acetyl-L-phenylalanine; an O-4-allyl-L-tyrosine; a 4-propyl-L-tyrosine; a tri-O-acetyl-GlcNAcβ-serine; an L-Dopa; a fluorinated phenylalanine; an isopropyl-L-phenylalanine; a p-azido-L-phenylalanine; a p-acyl-L-phenylalanine; a p-benzoyl-L-phenylalanine; an L-phosphoserine; a phosphonoserine; a phosphonotyrosine; a p-iodo-phenylalanine; a 4-fluorophenylglycine; a p-bromophenylalanine; a p-amino-L-phenylalanine; an isopropyl-L-phenylalanine; L-3-(2-naphthyl)alanine; an amino-, isopropyl-, or O-allyl-containing phenylalanine analogue; a dopa, O-methyl-L-tyrosine; a glycosylated amino acid; a p-(propargyloxy)phenylalanine; dimethyl-Lysine; hydroxy-proline; mercaptopropionic acid; methyl-lysine; 3-nitro-tyrosine; norleucine; pyro-glutamic acid; Z (Carbobenzoxyl); E-Acetyl-Lysine; β-alanine; aminobenzoyl derivative; aminobutyric acid (Abu); citrulline; aminohexanoic acid; aminoisobutyric acid; cyclohexylalanine; d-cyclohexylalanine; hydroxyproline; nitro-arginine; nitro-phenylalanine; nitro-tyrosine; norvaline; octahydroindole carboxylate; ornithine; penicillamine; tetrahydroisoquinoline; acetamidomethyl protected amino acids and pegylated amino acids. Further examples of unnatural amino acids and amino acid analogs can be found in U.S. 20030108885, U.S. 20030082575, US20060019347 (paragraphs 410-418) and the references cited therein. The polypeptides of the invention can include further modifications including those described in US20060019347, paragraph 589.

[0185] In some embodiments, an amino acid can be replaced by a naturally-occurring, non-essential amino acid, e.g., taurine.

[0186] Methods to manufacture peptides containing unnatural amino acids can be found in, for example, U.S. 20030108885, U.S. 20030082575, US20060019347, Deiters et al., J Am Chem. Soc. (2003) 125:11782-3, Chin et al., Science (2003) 301:964-7, and the references cited therein.

[0187] Peptides that include non-natural amino acids can also be prepared using the methods described in WO02086075

[0188] The peptides of the invention can have one or more conventional peptide bonds replaced by an alternative bond. Such replacements can increase the stability of the peptide. For example, replacement of the peptide bond between Cys₁₈ and Xaa₁₉ with an alternative bond can reduce cleavage by carboxy peptidases and may increase half-life in the digestive tract. Bonds that can replace peptide bonds include: a retro-inverso bonds (C(O)—NH instead of NH—C(O); a reduced amide bond (H—CH₂); a thiomethylene bond (S—CH₂ or CH₂—S); an oxomethylene bond (O—CH₂ or CH₂—O); an ethylene bond (CH₂—CH₂); a thioamide bond (C(S)—NH); a trans-olefine bond (CH═CH); an fluoro substituted trans-olefine bond (CF═CH); a ketomethylene bond (C(O)—CHR or CHR—C(O) wherein R is H or CH₃; and a fluoro-ketomethylene bond (C(O)—CFR or CFR—C(O) wherein R is H or F or CH₃.

[0189] The peptides of the invention can be modified using standard modifications. Modifications may occur at the amino (N-), carboxy (C-) terminus, internally or a combination of any of the preceeding. In one aspect of the invention, there may be more than one type of modification of the peptide. Modifications include but are not limited to: acetylation, amidation, biotinylation, cinnamoylation, farnesylation, formylation, myristoylation, palmitoylation, phosphorylation (Ser, Tyr or Thr), stearoylation, succinylation, sulfurylation and cyclisation (via disulfide bridges or amide cyclisation), and modification by Cy3 or Cy5. The peptides of the invention may also be modified by 2,4-dinitrophenyl (DNP), DNP-lysin, modification by 7-Amino-4-methyl-coumarin (AMC), flourescein, NBD (7-Nitrobenz-2-Oxa-1,3-Diazole), p-nitro-anilide, rhodamine B, EDANS (5-((2-aminoethyl)amino)naphthalene-1-sulfonic acid), dabcyl, dabsyl, dansyl, texas red, FMOC, and Tamra (Tetramethylrhodamine). The peptides of the invention may also be conjugated to, for example, polyethylene glycol (PEG); alkyl groups (e.g., C₁-C₂₀ straight or branched alkyl groups); fatty acid radicals; combinations of PEG, alkyl groups and fatty acid radicals (see U.S. Pat. No. 6,309,633; Soltero et al., 2001 Innovations in Pharmaceutical Technology 106-110); BSA and KLH (Keyhole Limpet Hemocyanin). The addition of PEG and other polymers which can be used to modify polypeptides of the invention is described in US2006019347 section IX.

[0190] The peptides and agonists of the invention can be chemically modified to increase therapeutic activity by synthetically adding sugar moieties (WO 88/02756; WO 89/09786; DE 3910667 A1, EP 0 374 089 A2; and U.S. Pat. No. 4,861,755), adding cationic anchors (EP0363589), lipid moieties (WO91/09837; U.S. Pat. No. 4,837,303) or the substituents described as compounds I, II, and III in U.S. Pat. No. 5,552,520.

[0191] When Xaa₉ is Trp, Tyr or Phe or when Xaa₁₆ is Trp the peptide has a potentially functional chymotrypsin cleavage site that is located at a position where cleavage may alter GC-C receptor binding by the peptide. When Xaa₉ is Lys or Arg or when Xaa₁₆ is Lys or Arg, the peptide has a potentially functional trypsin cleavage site that is located at a position where cleavage may alter GC-C receptor binding by the peptide.

[0192] When Xaa₁₉ is Trp, Tyr or Phe, the peptide has a chymotrypsin cleavage site that is located at a position where cleavage will liberate the portion of the peptide carboxy-terminal to Xaa₁₉. When Xaa₁₉ is Leu, Ile or Val, the peptide can have a chymotrypsin cleavage site that is located at a position where cleavage will liberate the portion of the peptide amino-terminal to Xaa₁₉. At relatively high pH the same effect is seen when Xaa₁₉ is His. When Xaa₁₉ is Lys or Arg, the peptide has a trypsin cleavage site that is located at a position where cleavage will liberate portion of the peptide carboxy-terminal to Xaa₁₉. Thus, if the peptide includes an analgesic peptide carboxy-terminal to Xaa₁₉, the peptide will be liberated in the digestive tract upon exposure to the appropriate protease. Among the analgesic peptides which can be included in the peptide and/or coadministered with the peptide are: AspPhe (as Xaa₂₀Xaa₂₁), endomorphin-1, endomorphin-2, nocistatin, dalargin, lupron, ziconotide, and substance P and other analgesic peptides described herein. These peptides can, for example, be used to replace Xaa₂₀Xaa₂₁.

[0193] When Xaa₁ or the amino-terminal amino acid of the peptide of the invention (e.g., Xaa₂ or Xaa₃) is Trp, Tyr or Phe, the peptide has a chymotrypsin cleavage site that is located at a position where cleavage will liberate the portion of the peptide amino-terminal to Xaa₁ (or Xaa₂ or Xaa₃) along with Xaa₁, Xaa₂ or Xaa₃. When Xaa₁ or the amino-terminal amino acid of the peptide of the invention (e.g., Xaa₂ or Xaa₃) is Lys or Arg, the peptide has a trypsin cleavage site that is located at a position where cleavage will liberate portion of the peptide amino-terminal to Xaa₁ along with Xaa₁, Xaa₂ or Xaa₃).

[0194] When Xaa₁ or the amino-terminal amino acid of the peptide of the invention is Leu, Ile or Val, the peptide can have a chymotrypsin cleavage site that is located at a position where cleavage will liberate the portion of the peptide amino-terminal to Xaa₁. At relatively high pH the same effect is seen when Xaa₁ is His. Thus, for example, if the peptide includes an analgesic peptide amino-terminal to Xaa₁, the peptide will be liberated in the digestive tract upon exposure to the appropriate protease. Among the analgesic peptides which can be included in the peptide are: AspPhe, endomorphin-1, endomorphin-2, nocistatin, dalargin, lupron, and substance p and other analgesic peptides described herein.

[0195] When fully folded, disulfide bonds may be present between: Cys₆ and Cys₁₁; Cys₇ and Cys₁₅; and Cys₁₀ and Cys₁₈. The peptides of the invention bear some sequence similarity to ST peptides. However, they include amino acid changes and/or additions that improve functionality. These changes can, for example, increase or decrease activity (e.g., increase or decrease the ability of the peptide to stimulate intestinal motility), alter the ability of the peptide to fold correctly, alter the stability of the peptide, alter the ability of the peptide to bind the GC-C receptor and/or decrease toxicity. In some cases the peptides may function more desirably than wild-type ST peptide. For example, they may limit undesirable side effects such as diarrhea and dehydration.

[0196] In some embodiments one or both members of one or more pairs of Cys residues which normally form a disulfide bond can be replaced by homocysteine, penicillamine, 3-mercaptoproline (Kolodziej et al. 1996 Int J Pept Protein Res 48:274); β,βdimethylcysteine (Hunt et al. 1993 Int J Pept Protein Res 42:249) or diaminopropionic acid (Smith et al. 1978 J Med Chem 21:117) to form alternative internal cross-links at the positions of the normal disulfide bonds.

[0197] In addition, one or more disulfide bonds can be replaced by alternative covalent cross-links, e.g., an amide linkage (—CH₂CH(O)NHCH₂— or —CH₂NHCH(O)CH₂—), an ester linkage, a thioester linkage, a lactam bridge, a carbamoyl linkage, a urea linkage, a thiourea linkage, a phosphonate ester linkage, an alkyl linkage (—CH₂CH₂CH₂CH₂—), an alkenyl linkage(—CH₂CH═CHCH₂—), an ether linkage (—CH₂CH₂OCH₂— or —CH₂OCH₂CH₂—), a thioether linkage (—CH₂CH₂SCH₂— or —CH₂SCH₂CH₂—), an amine linkage (—CH₂CH₂NHCH₂— or —CH₂NHCH₂CH₂—) or a thioamide linkage (—CH₂CH(S)HNHCH₂— or —CH₂NHCH(S)CH₂—). For example, Ledu et al. (Proc Nat'l Acad. Sci. 100:11263-78, 2003) describe methods for preparing lactam and amide cross-links. Schafmeister et al. (J. Am. Chem. Soc. 122:5891, 2000) describes stable, hydrocarbon cross-links. Hydrocarbon cross links can be produced via metathesis (or methathesis followed by hydrogenation in the case of saturated hydrocarbons cross-links) using one or another of the Grubbs catalysts (available from Materia, Inc. and Sigma-Aldrich and described, for example, in U.S. Pat. Nos. 5,831,108 and 6,111,121). In some cases, the generation of such alternative cross-links requires replacing the Cys residues with other residues such as Lys or Glu or non-naturally occurring amino acids. In addition the lactam, amide and hydrocarbon cross-links can be used to stabilize the peptide even if they link amino acids at positions other than those occupied by Cys. Such cross-links can occur between two amino acids that are separated by two amino acids or between two amino acids that are separated by six amino acids (see, e.g., Schafmeister et al. (J. Am. Chem. Soc. 122:5891, 2000)).

[0198] In the case of a peptide comprising the sequence (I): Xaa₁ Xaa₂ Xaa₃ Xaa₄ Xaa₅ Cys₆ Cys₇ Xaa₈ Xaa₉ Cys₁₀ Cys₁₁ Xaa₁₂ Xaa₁₃ Xaa₁₄ Cys₁₅ Xaa₁₆ Xaa₁₇ Cys₁₈ Xaa₁₉ Xaa₂₀ Xaa₂₁ or Xaa₁ Xaa₂ Xaa₃ Xaa₄ Xaa₅ Cys Cys Glu Xaa₉ Cys Cys Asn Pro Ala Cys Thr Gly Cys Tyr Xaa₂₀ Xaa₂₁ (II) wherein: Xaa₁ Xaa₂ Xaa₃ Xaa₄ Xaa₅ is missing and/or the sequence Xaa₁₉ Xaa₂₀ Xaa₂₁ is missing, the peptide can still contain additional carboxyterminal or amino terminal amino acids or both. For example, the peptide can include an amino terminal sequence that facilitates recombinant production of the peptide and is cleaved prior to administration of the peptide to a patient. The peptide can also include other amino terminal or carboxyterminal amino acids. In some cases the additional amino acids protect the peptide, stabilize the peptide or alter the activity of the peptide. In some cases some or all of these additional amino acids are removed prior to administration of the peptide to a patient. The peptide can include 1, 2, 3, 4, 5, 10, 15, 20, 25, 30, 40, 50, 60, 70 80, 90, 100 or more amino acids at its amino terminus or carboxy terminus or both. The number of flanking amino acids need not be the same. For example, there can be 10 additional amino acids at the amino terminus of the peptide and none at the carboxy terminus.

[0199] In one embodiment the peptide comprises the amino acid sequence (I): Xaa₁ Xaa₂ Xaa₃ Xaa₄ Xaa₅ Cys₆ Cys₇ Xaa₈ Xaa₉ Cys₁₀ Cys₁₁ Xaa₁₂ Xaa₁₃ Xaa₁₄ Cys₁₅ Xaa₁₆ Xaa₁₇ Cys₁₈ Xaa₁₉ Xaa₂₀ Xaa₂₁ wherein: Xaa₁ Xaa₂ Xaa₃ Xaa₄ Xaa₅ is missing; Xaa₈ is Glu; Xaa₉ is Leu, Ile, Lys, Arg, Trp, Tyr or Phe; Xaa₁₂ is Asn; Xaa₁₃ is Pro; Xaa₁₄ is Ala; Xaa₁₆ is Thr, Ala, Lys, Arg, Trp; Xaa₁₇ is Gly; Xaa₁₉ is Tyr or Leu; and Xaa₂₀ Xaa₂₁ is AspPhe or is missing. Where Xaa₂₀ Xaa₂₁ and/or Xaa₁ Xaa₂ Xaa₃ Xaa₄ Xaa₅ are missing, there may be additional flanking amino acids in some embodiments. In certain embodiments of a composition comprising a peptide having the sequence (I): Xaa₁ Xaa₂ Xaa₃ Xaa₄ Xaa₅ Cys₆ Cys₇ Xaa₈ Xaa₉ Cys₁₀ Cys₁₁ Xaa₁₂ Xaa₁₃ Xaa₁₄ Cys₁₅ Xaa₁₆ Xaa₁₇ Cys₁₈ Xaa₁₉ Xaa₂₀ Xaa₂₁, the peptide does not comprise or consist of any of the peptides of Table I.

[0200] In a second aspect, the invention also features a therapeutic or prophylactic method comprising administering to a patient a pharmaceutical composition comprising or consisting essentially of a purified peptide comprising, consisting of or consisting essentially of the amino acid sequence: Xaa₁ Xaa₂ Xaa₃ Xaa₄ Xaa₅ Cys₆ Cys₇ Xaa₈ Xaa₉ Cys₁₀ Cys₁₁ Xaa₁₂ Xaa₁₃ Xaa₁₄ Cys₁₅ Xaa₁₆ Xaa₁₇ Cys₁₈ Xaa₁₉ Xaa₂₀ Xaa₂₁ (I) or Xaa₁ Xaa₂ Xaa₃ Xaa₄ Xaa₅ Cys₆ Cys₇ Xaa₈ Xaa₉ Cys₁₀ Cys₁₁ Asn₁₂ Pro₁₃ Ala₁₄ Cys₁₅ Xaa₁₆ Gly₁₇ Cys₁₈ Xaa₁₉ Xaa₂₀ Xaa₂₁ (II) as described herein.

[0201] The peptides can be co-administered with or linked, e.g., covalently linked to any of a variety of other peptides or compounds including analgesic peptides or analgesic compounds including, without limitation, the agents described herein.

[0202] Amino acid, non-amino acid, peptide and non-peptide spacers can be interposed between a peptide that is a GC-C receptor agonist and a peptide that has some other biological function, e.g., an analgesic peptide or a peptide used to treat obesity. The linker can be one that is cleaved from the flanking peptides in vivo or one that remains linked to the flanking peptides in vivo. For example, glycine, beta-alanine, glycyl-glycine, glycyl-beta-alanine, gamma-aminobutyric acid, 6-aminocaproic acid, L-phenylalanine, L-tryptophan and glycil-L-valil-L-phenylalanine can be used as spacers (Chaltin et al. 2003 Helvetica ChimicaActa 86:533-547; Caliceti et al. 1993 FARMCO 48:919-32) as can polyethylene glycols (Butterworth et al. 1987 J. Med. Chem. 30:1295-302) and maleimide derivatives (King et al. 2002 Tetrahedron Lett. 43:1987-1990). Various other linkers are described in the literature (Nestler 1996 Molecular Diversity 2:35-42; Finn et al. 1984 Biochemistry 23:2554-8; Cook et al. 1994 Tetrahedron Lett. 35:6777-80; Brokx et al. 2002 Journal of Controlled Release 78:115-123; Griffin et al. 2003 J. Am. Chem. Soc. 125:6517-6531; Robinson et al. 1998 Proc. Natl. Acad. Sci. USA 95:5929-5934). Linkers are also described in US20050171014, for example, amino acid linkers such as FALA, VLALA, ALAL, ALALA, 2-cyclohexyl-L-alanine-LALA, 2-cyclohexyl-L-alanine-2-cyclohexyl-L-alanine-LAL, 1-naphtyl-alanine-ChaLAL and 1-naphtyl-alanine-LALA. Peptides and agonists of the invention can also be conjugated to: an affinity tag (such as (histidine 6) H6), a HIV tat peptide residues 49-57, HIV tat peptide residues 49-56, the tat sequence YGRKKRRQRRR, a polyarginine peptide having from 6 to 20 residues (such as R6) and the following peptide sequences: YARKARRQARR, YARAAARQARA, YARAARRAARR, YARAARRAARA, ARRRRRRRRR, and YAAARRRRRRR, which are disclosed in WO 99/29721 and in U.S. Pat. No. 6,221,355 (seq. id. nos. 3-8).

[0203] The peptides of the invention can be attached to one, two or more different moieties each providing the same or different functions. For example, the peptide can be linked to a molecule that is an analgesic and to a peptide that is used to treat obesity. The peptide and various moieties can be ordered in various ways. For example, a peptide of the invention can have an analgesic peptide linked to its amino terminus and an anti-obesity peptide linked to its carboxy terminus. The additional moieties can be directly covalently bonded to the peptide or can be bonded via linkers.

[0204] The peptides of the invention can be a cyclic peptide or a linear peptide. In addition, multiple copies of the same peptide can be incorporated into a single cyclic or linear peptide.

[0205] The peptides can include the amino acid sequence of a peptide that occurs naturally in a vertebrate (e.g., mammalian) species or in a bacterial species. In addition, the peptides can be partially or completely non-naturally occurring peptides. Also within the invention are peptidomimetics corresponding to the peptides of the invention.

[0206] In various embodiments, the patient is suffering from a gastrointestinal disorder; the patient is suffering from a disorder selected from the group consisting of: gastrointestinal motility disorders, chronic intestinal pseudo-obstruction, colonic pseudo-obstruction, Crohn's disease, duodenogastric reflux, dyspepsia, functional dyspepsia, nonulcer dyspepsia, a functional gastrointestinal disorder, functional heartburn, gastroesophageal reflux disease (GERD), gastroparesis, irritable bowel syndrome, post-operative ileus, ulcerative colitis, chronic constipation, and disorders and conditions associated with constipation (e.g. constipation associated with use of opiate pain killers, post-surgical constipation, and constipation associated with neuropathic disorders as well as other conditions and disorders are described herein); the patient is suffering from a gastrointestinal motility disorders, chronic intestinal pseudo-obstruction, colonic pseudo-obstruction, Crohn's disease, duodenogastric reflux, dyspepsia, functional dyspepsia, nonulcer dyspepsia, a functional gastrointestinal disorder, functional heartburn, gastroesophageal reflux disease (GERD), gastroparesis, inflammatory bowel disease, irritable bowel syndrome, post-operative ileus, ulcerative colitis, chronic constipation, and disorders and conditions associated with constipation (e.g. constipation associated with use of opiate pain killers, post-surgical constipation, and constipation associated with neuropathic disorders as well as other conditions and disorders are described herein); the composition is administered orally; the peptide comprises 30 or fewer amino acids, the peptide comprises 20 or fewer amino acids, and the peptide comprises no more than 5 amino acids prior to Cys₆; the peptide comprises 150, 140, 130, 120, 110, 100, 90, 80, 70, 60, 50, 40, or 30 or fewer amino acids. In other embodiments, the peptide comprises 20 or fewer amino acids. In other embodiments the peptide comprises no more than 20, 15, 10, or 5 peptides subsequent to Cys₁₈. In certain embodiments Xaa₁₉ is a chymotrypsin or trypsin cleavage site and an analgesic peptide is present immediately following Xaa₁₉.

[0207] In a third aspect, the invention features a method for treating a patient suffering from constipation. Clinically accepted criteria that define constipation include the frequency of bowel movements, the consistency of feces and the ease of bowel movement. One common definition of constipation is less than three bowel movements per week. Other definitions include abnormally hard stools or defecation that requires excessive straining (Schiller 2001, Aliment Pharmacol Ther 15:749-763). Constipation may be idiopathic (functional constipation or slow transit constipation) or secondary to other causes including neurologic, metabolic or endocrine disorders. These disorders include diabetes mellitus, hypothyroidism, hyperthyroidism, hypocalcaemia, Multiple Sclerosis, Parkinson's disease, spinal cord lesions, Neurofibromatosis, autonomic neuropathy, Chagas disease, Hirschsprung's disease and Cystic fibrosis. Constipation may also be the result of surgery (postoperative ileus) or due to the use of drugs such as analgesics (like opioids), antihypertensives, anticonvulsants, antidepressants, antispasmodics and antipsychotics. The method of treating constipation comprises administering a pharmaceutical composition comprising or consisting essentially of a peptide comprising, consisting of or consisting essentially of the amino acid sequence: Xaa₁ Xaa₂ Xaa₃ Xaa₄ Xaa₅ Cys₆ Cys₇ Xaa₈ Xaa₉ Cys₁₀ Cys₁₁ Xaa₁₂ Xaa₁₃ Xaa₁₄ Cys₁₅ Xaa₁₆ Xaa₁₇ Cys₁₈ Xaa₁₉ Xaa₂₀ Xaa₂₁ (I) or Xaa₁ Xaa₂ Xaa₃ Xaa₄ Xaa₅ Cys₆ Cys₇ Xaa₈ Xaa₉ Cys₁₀ Cys₁₁ Asn₁₂ Pro₁₃ Ala₁₄ Cys₁₅ Xaa₁₆ Gly₁₇ Cys₁₈ Xaa₁₉ Xaa₂₀ Xaa₂₁ (II) as described herein.

[0208] In various embodiments, the constipation is associated with use of a therapeutic agent; the constipation is associated with a neuropathic disorder; the constipation is post-surgical constipation (postoperative ileus); and the constipation associated with a gastrointestinal disorder; the constipation is idiopathic (functional constipation or slow transit constipation); the constipation is spinal chord injury induced; the constipation is thyroid disease related; the constipation is associated with neuropathic, metabolic or endocrine disorder (e.g., diabetes mellitus, hypothyroidism, hyperthyroidism, hypocalcaemia, Multiple Sclerosis, Parkinson's disease, spinal cord lesions, neurofibromatosis, autonomic neuropathy, Chagas disease, Hirschsprung's disease or cystic fibrosis). Constipation may also be the result of surgery (postoperative ileus) or due the use of drugs such as analgesics (e.g., opioids), antihypertensives, anticonvulsants, antidepressants, antispasmodics and antipsychotics.

[0209] In a fourth aspect, the invention features a method for treating a patient suffering a gastrointestinal disorder, the method comprising administering to the patient a pharmaceutical composition comprising or consisting essentially of a purified peptide comprising, consisting of or consisting essentially of the amino acid sequence: Xaa₁ Xaa₂ Xaa₃ Xaa₄ Xaa₅ Cys₆ Cys₇ Xaa₈ Xaa₉ Cys₁₀ Cys₁₁ Xaa₁₂ Xaa₁₃ Xaa₁₄ Cys₁₅ Xaa₁₆ Xaa₁₇ Cys₁₈ Xaa₁₉ Xaa₂₀ Xaa₂₁ (I) or Xaa₁ Xaa₂ Xaa₃ Xaa₄ Xaa₅ Cys₆ Cys₇ Xaa₈ Xaa₉ Cys₁₀ Cys₁₁ Asn₁₂ Pro₁₃ Ala₁₄ Cys₁₅ Xaa₁₆ Gly₁₇ Cys₁₈ Xaa₁₉ Xaa₂₀ Xaa₂₁ (II) as described herein.

[0210] In various embodiments, the patient is suffering from a gastrointestinal disorder; the patient is suffering from a disorder selected from the group consisting of: gastrointestinal motility disorders, chronic intestinal pseudo-obstruction, colonic pseudo-obstruction, Crohn's disease, duodenogastric reflux, dyspepsia, functional dyspepsia, nonulcer dyspepsia, a functional gastrointestinal disorder, functional heartburn, gastroesophageal reflux disease (GERD), gastroparesis, irritable bowel syndrome, post-operative ileus, ulcerative colitis, chronic constipation, and disorders and conditions associated with constipation (e.g. constipation associated with use of opiate pain killers, post-surgical constipation, and constipation associated with neuropathic disorders as well as other conditions and disorders are described herein), obesity, congestive heart failure, or benign prostatic hyperplasia.

[0211] In a fifth aspect, the invention features a method for increasing gastrointestinal motility in a patient, the method comprising administering to a patient a pharmaceutical composition comprising a purified peptide comprising, consisting of or consisting essentially of the amino acid sequence: Xaa₁ Xaa₂ Xaa₃ Xaa₄ Xaa₅ Cys₆ Cys₇ Xaa₈ Xaa₉ Cys₁₀ Cys₁₁ Xaa₁₂ Xaa₁₃ Xaa₁₄ Cys₁₅ Xaa₁₆ Xaa₁₇ Cys₁₈ Xaa₁₉ Xaa₂₀ Xaa₂₁ (I) or Xaa₁ Xaa₂ Xaa₃ Xaa₄ Xaa₅ Cys₆ Cys₇ Xaa₈ Xaa₉ Cys₁₀ Cys₁₁ Asn₁₂ Pro₁₃ Ala₁₄ Cys₁₅ Xaa₁₆ Gly₁₇ Cys₁₈ Xaa₁₉ Xaa₂₀ Xaa₂₁ (II) as described herein.

[0212] In a sixth aspect, the invention features a method for increasing the activity of (activating)

[0213] an intestinal guanylate cyclase (GC-C) receptor in a patient, the method comprising administering to a patient a pharmaceutical composition comprising a purified peptide comprising, consisting of or consisting essentially of the amino acid sequence: Xaa₁ Xaa₂ Xaa₃ Xaa₄ Xaa₅ Cys₆ Cys₇ Xaa₈ Xaa₉ Cys₁₀ Cys₁₁ Xaa₁₂ Xaa₁₃ Xaa₁₄ Cys₁₅ Xaa₁₆ Xaa₁₇ Cys₁₈ Xaa₁₉ Xaa₂₀ Xaa₂₁ (I) or Xaa₁ Xaa₂ Xaa₃ Xaa₄ Xaa₅ Cys₆ Cys₇ Xaa₈ Xaa₉ Cys₁₀ Cys₁₁ Asn₁₂ Pro₁₃ Ala₁₄ Cys₁₅ Xaa₁₆ Gly₁₇ Cys₁₈ Xaa₁₉ Xaa₂₀ Xaa₂₁ (II) as described herein.

[0214] In a seventh aspect, the invention features an isolated nucleic acid molecule comprising a nucleotide sequence encoding a polypeptide comprising the amino acid sequence: Xaa₁ Xaa₂ Xaa₃ Xaa₄ Xaa₅ Cys₆ Cys₇ Xaa₈ Xaa₉ Cys₁₀ Cys₁₁ Xaa₁₂ Xaa₁₃ Xaa₁₄ Cys₁₅ Xaa₁₆ Xaa₁₇ Cys₁₈ Xaa₁₉ Xaa₂₀ Xaa₂₁ (I) or Xaa₁ Xaa₂ Xaa₃ Xaa₄ Xaa₅ Cys₆ Cys₇ Xaa₈ Xaa₉ Cys₁₀ Cys₁₁ Asn₁₂ Pro₁₃ Ala₁₄ Cys₁₅ Xaa₁₆ Gly₁₇ Cys₁₈ Xaa₁₉ Xaa₂₀ Xaa₂₁ (II) as described herein.

[0215] In an eighth aspect the invention features a method for treating constipation, the method comprising administering an agonist of the intestinal guanylate cyclase (GC-C) receptor. In various embodiments: the agonist is a peptide, the peptide includes two Cys that form one disulfide bond, the peptide includes four Cys that form two disulfide bonds, and the peptide includes six Cys that form three disulfide bonds.

[0216] In a ninth aspect, the invention features a method for treating a gastrointestinal disorder, gastrointestinal motility disorders, chronic intestinal pseudo-obstruction, colonic pseudo-obstruction, Crohn's disease, duodenogastric reflux, dyspepsia, functional dyspepsia, nonulcer dyspepsia, a functional gastrointestinal disorder, functional heartburn, gastroesophageal reflux disease (GERD), gastroparesis, irritable bowel syndrome, post-operative ileus, ulcerative colitis, chronic constipation, and disorders and conditions associated with constipation (e.g. constipation associated with use of opiate pain killers, post-surgical constipation, and constipation associated with neuropathic disorders as well as other conditions and disorders are described herein), obesity, congestive heart failure, or benign prostatic hyperplasia, the method comprising administering an agonist of the intestinal guanylate cyclase (GC-C) receptor either orally, by rectal suppository, or parenterally. In various embodiments: the agonist is a peptide, the peptide includes two Cys that form one disulfide bond, the peptide includes four Cys that form two disulfide bonds, and the peptide includes six Cys that form three disulfide bonds.

[0217] In a tenth aspect, the invention features a method for treating a gastrointestinal disorder selected from the group consisting of: gastrointestinal motility disorders, chronic intestinal pseudo-obstruction, colonic pseudo-obstruction, Crohn's disease, duodenogastric reflux, dyspepsia, functional dyspepsia, nonulcer dyspepsia, a functional gastrointestinal disorder, functional heartburn, gastroesophageal reflux disease (GERD), gastroparesis, irritable bowel syndrome, post-operative ileus, ulcerative colitis, chronic constipation, and disorders and conditions associated with constipation (e.g. constipation associated with use of opiate pain killers, post-surgical constipation, and constipation associated with neuropathic disorders as well as other conditions and disorders are described herein), the method comprising administering an agonist of the intestinal guanylate cyclase (GC-C) receptor. In various embodiments the composition is administered orally; the peptide comprises 30 or fewer amino acids, the peptide comprises 20 or fewer amino acids, and the peptide comprises no more than 5 amino acids prior to Cys₅.

[0218] In various embodiments: the agonist is a peptide, the peptide includes two Cys that form one disulfide bond, the peptide includes four Cys that form two disulfide bonds, and the peptide includes six Cys that form three disulfide bonds.

[0219] In an eleventh aspect, the invention features a method for treating obesity, the method comprising administering a complete or partial agonist of the intestinal guanylate cyclase (GC-C) receptor. In various embodiments: the agonist is a peptide, the peptide includes two Cys that form one disulfide bond, the peptide includes four Cys that form two disulfide bonds, and the peptide includes six Cys that form three disulfide bonds. The agonist can be administered alone or in combination with one or more agents for treatment of obesity, including but not limited to the anti-obesity agents described herein. Thus, for example, PYY₃₋₃₆ can be fused to the carboxy or amino terminus of a peptide of the invention. Such a fusion protein can include a chymostrypsin or trypsin cleavage site that can permit cleavage to separate the two peptides.

[0220] In a twelfth aspect, the invention features a method for treating obesity, the method comprising administering to a patient a pharmaceutical composition comprising or consisting essentially of a purified peptide comprising, consisting of or consisting essentially of the amino acid sequence: Xaa₁ Xaa₂ Xaa₃ Xaa₄ Xaa₅ Cys₆ Cys₇ Xaa₈ Xaa₉ Cys₁₀ Cys₁₁ Xaa₁₂ Xaa₁₃ Xaa₁₄ Cys₁₅ Xaa₁₆ Xaa₁₇ Cys₁₈ Xaa₁₉ Xaa₂₀ Xaa₂₁ (I) or Xaa₁ Xaa₂ Xaa₃ Xaa₄ Xaa₅ Cys₆ Cys₇ Xaa₈ Xaa₉ Cys₁₀ Cys₁₁ Asn₁₂ Pro₁₃ Ala₁₄ Cys₁₅ Xaa₁₆ Gly₁₇ Cys₁₈ Xaa₁₉ Xaa₂₀ Xaa₂₁ (II) as described herein.

[0221] In a thirteenth aspect, the invention features a composition comprising or consisting essentially of a purified peptide comprising, consisting of or consisting essentially of the amino acid sequence: Xaa₁ Xaa₂ Xaa₃ Xaa₄ Xaa₅ Cys₆ Cys₇ Xaa₈ Xaa₉ Cys₁₀ Cys₁₁ Xaa₁₂ Xaa₁₃ Xaa₁₄ Cys₁₅ Xaa₁₆ Xaa₁₇ Cys₁₈ Xaa₁₉ Xaa₂₀ Xaa₂₁ (I) or Xaa₁ Xaa₂ Xaa₃ Xaa₄ Xaa₅ Cys₆ Cys₇ Xaa₈ Xaa₉ Cys₁₀ Cys₁₁ Asn₁₂ Pro₁₃ Ala₁₄ Cys₁₅ Xaa₁₆ Gly₁₇ Cys₁₈ Xaa₁₉ Xaa₂₀ Xaa₂₁ (II) as described herein. In one embodiment, the composition is a pharmaceutical composition.

[0222] In a fourteenth aspect, the invention features a method for treating congestive heart failure, the method comprising administering to a patient a pharmaceutical composition comprising or consisting essentially of a purified peptide comprising, consisting of or consisting essentially of the amino acid sequence: Xaa₁ Xaa₂ Xaa₃ Xaa₄ Xaa₅ Cys₆ Cys₇ Xaa₈ Xaa₉ Cys₁₀ Cys₁₁ Xaa₁₂ Xaa₁₃ Xaa₁₄ Cys₁₅ Xaa₁₆ Xaa₁₇ Cys₁₈ Xaa₁₉ Xaa₂₀ Xaa₂₁ (I) or Xaa₁ Xaa₂ Xaa₃ Xaa₄ Xaa₅ Cys₆ Cys₇ Xaa₈ Xaa₉ Cys₁₀ Cys₁₁ Asn₁₂ Pro₁₃ Ala₁₄ Cys₁₅ Xaa₁₆ Gly₁₇ Cys₁₈ Xaa₁₉ Xaa₂₀ Xaa₂₁ (II) as described herein. In various embodiments the congestive heart failure is categorized as Class II congestive heart failure; the congestive heart failure is categorized as Class III congestive heart failure; and the congestive heart failure is categorized as Class IV congestive heart failure. The New York Heart Association (NYHA) functional classification system relates congestive heart failure symptoms to everyday activities and the patient's quality of life. The NYHA defines the classes of patient symptoms relating to congestive heart failure as: Class II—slight limitation of physical activity, comfortable at rest, but ordinary physical activity results in fatigue, palpitation, or dyspnea; Class III—marked limitation of physical activity, comfortable at rest, but less than ordinary activity causes fatigue, palpitation, or dyspnea and Class IV—unable to carry out any physical activity without discomfort, symptoms of cardiac insufficiency at rest, if any physical activity is undertaken, discomfort is increased. Heart failure treatment using the polypeptides and methods described herein can also be classified according to the ACC/AHA guidelines (Stage A: At risk for developing heart failure without evidence of cardiac dysfunction; Stage B: Evidence of cardiac dysfunction without symptoms; Stage C: Evidence of cardiac dysfunction with symptoms; and Stage D: Symptoms of heart failure despite maximal therapy).

[0223] The peptide can be administered in combination with one or more agents for treatment of congestive heart failure, for example, a natriuretic peptide such as atrial natriuretic peptide, brain natriuretic peptide or C-type natriuretic peptide), a diuretic, or an inhibitor of angiotensin converting enzyme.

[0224] In a fifteenth aspect, the invention features a method for treating benign prostatic hyperplasia, the method comprising administering to a patient a pharmaceutical composition comprising a purified peptide comprising, consisting of or consisting essentially of the amino acid sequence: Xaa₁ Xaa₂ Xaa₃ Xaa₄ Xaa₅ Cys₆ Cys₇ Xaa₈ Xaa₉ Cys₁₀ Cys₁₁ Xaa₁₂ Xaa₁₃ Xaa₁₄ Cys₁₅ Xaa₁₆ Xaa₁₇ Cys₁₈ Xaa₁₉ Xaa₂₀ Xaa₂₁ (I) or Xaa₁ Xaa₂ Xaa₃ Xaa₄ Xaa₅ Cys₆ Cys₇ Xaa₈ Xaa₉ Cys₁₀ Cys₁₁ Asn₁₂ Pro₁₃ Ala₁₄ Cys₁₅ Xaa₁₆ Gly₁₇ Cys₁₈ Xaa₁₉ Xaa₂₀ Xaa₂₁ (II) as described herein. The peptide can be administered alone or in combination with another agent for treatment of BPH, for example, a 5-alpha reductase inhibitor (e.g., finasteride) or an alpha adrenergic inhibitor (e.g., doxazosine).

[0225] In a sixteenth aspect, the invention features a method for treating or reducing pain, including visceral pain, pain associated with a gastrointestinal disorder or pain associated with some other disorder, the method comprising administering to a patient a pharmaceutical composition comprising or consisting essentially of a purified peptide comprising, consisting of or consisting essentially of the amino acid sequence: Xaa₁ Xaa₂ Xaa₃ Xaa₄ Xaa₅ Cys₆ Cys₇ Xaa₈ Xaa₉ Cys₁₀ Cys₁₁ Xaa₁₂ Xaa₁₃ Xaa₁₄ Cys₁₅ Xaa₁₆ Xaa₁₇ Cys₁₈ Xaa₁₉ Xaa₂₀ Xaa₂₁ (I) or Xaa₁ Xaa₂ Xaa₃ Xaa₄ Xaa₅ Cys₆ Cys₇ Xaa₉ Xaa₉ Cys₁₀ Cys₁₁ Asn₁₂ Pro₁₃ Ala₁₄ Cys₁₅ Xaa₁₆ Gly₁₇ Cys₁₈ Xaa₁₉ Xaa₂₀ Xaa₂₁ (II) as described herein.

[0226] In a seventeenth aspect, the invention features a method for treating inflammation, including inflammation of the gastrointestinal tract, e.g., inflammation associated with a gastrointestinal disorder or infection or some other disorder, the method comprising administering to a patient a pharmaceutical composition comprising a purified peptide comprising, consisting of or consisting essentially of the amino acid sequence: Xaa₁ Xaa₂ Xaa₃ Xaa₄ Xaa₅ Cys₆ Cys₇ Xaa₈ Xaa₉ Cys₁₀ Cys₁₁ Xaa₁₂ Xaa₁₃ Xaa₁₄ Cys₁₅ Xaa₁₆ Xaa₁₇ Cys₁₈ Xaa₁₉ Xaa₂₀ Xaa₂₁ (I) or Xaa₁ Xaa₂ Xaa₃ Xaa₄ Xaa₅ Cys₆ Cys₇ Xaa₈ Xaa₉ Cys₁₀ Cys₁₁ Asn₁₂ Pro₁₃ Ala₁₄ Cys₁₅ Xaa₁₆ Gly₁₇ Cys₁₈ Xaa₁₉ Xaa₂₀ Xaa₂₁ (II) as described herein.

[0227] In an eighteenth aspect, the invention features a method for treating congestive heart failure, the method comprising administering a complete or partial agonist of the intestinal guanylate cyclase (GC-C) receptor. The agonist can be administered alone or in combination with another agent for treatment of congestive heart failure, for example, a natriuretic peptide such as atrial natriuretic peptide, brain natriuretic peptide or C-type natriuretic peptide, a diuretic, or an inhibitor of angiotensin converting enzyme.

[0228] In a nineteenth aspect, the invention features a method for treating BPH, the method comprising administering a complete or partial agonist of the intestinal guanylate cyclase (GC-C) receptor. The agonist can be administered alone or in combination with another agent for treatment of BPH, for example, a 5-alpha reductase inhibitor (e.g., finasteride) or an alpha adrenergic inhibitor (e.g., doxazosine).

[0229] In a twentieth aspect, the invention features isolated nucleic acid molecules comprising a sequence encoding a peptide of the invention. Also within the invention are vectors, e.g., expression vectors that include such nucleic acid molecules and can be used to express a peptide of the invention in a cultured cell (e.g., a eukaryotice cell or a prokaryotic cell). The vector can further include one or more regulatory elements, e.g., a heterologous promoter or elements required for translation operably linked to the sequence encoding the peptide. In some cases the nucleic acid molecule will encode an amino acid sequence that includes the amino acid sequence of a peptide of the invention. For example, the nucleic acid molecule can encode a preprotein or a preproprotein that can be processed to produce a polypeptide described herein. In cases where unnatural amino acids are present in the polypeptides described herein, selector codons can be utilized in the synthesis of such polypeptides similar to that described in US20060019347 (for example, paragraphs 398-408, 457-499, and 576-588) herein incorporated by reference.

[0230] A vector that includes a nucleotide sequence encoding a peptide of the invention or a peptide or polypeptide comprising a peptide of the invention may be either RNA or DNA, single- or double-stranded, prokaryotic, eukaryotic, or viral. Vectors can include transposons, viral vectors, episomes, (e.g., plasmids), chromosomes inserts, and artificial chromosomes (e.g. BACs or YACs). Suitable bacterial hosts for expression of the encode peptide or polypeptide include, but are not limited to, E. coli. Suitable eukaryotic hosts include yeast such as S. cerevisiae, other fungi, vertebrate cells, invertebrate cells (e.g., insect cells), plant cells, human cells, human tissue cells, and whole eukaryotic organisms. (e.g., a transgenic plant or a transgenic animal). Further, the vector nucleic acid can be used to transfect a virus such as vaccinia or baculovirus (for example using the Bac-to-Bac® Baculovirus expression system (Invitrogen Life Technologies, Carlsbad, Calif.)).

[0231] As noted above the invention includes vectors and genetic constructs suitable for production of a peptide of the invention or a peptide or polypeptide comprising such a peptide. Generally, the genetic construct also includes, in addition to the encoding nucleic acid molecule, elements that allow expression, such as a promoter and regulatory sequences. The expression vectors may contain transcriptional control sequences that control transcriptional initiation, such as promoter, enhancer, operator, and repressor sequences. A variety of transcriptional control sequences are well known to those in the art and may be functional in, but are not limited to, a bacterium, yeast, plant, or animal cell. The expression vector can also include a translation regulatory sequence (e.g., an untranslated 5′ sequence, an untranslated 3′ sequence, a poly A addition site, or an internal ribosome entry site), a splicing sequence or splicing regulatory sequence, and a transcription termination sequence. The vector can be capable of autonomous replication or it can integrate into host DNA.

[0232] The invention also includes isolated host cells harboring one of the forgoing nucleic acid molecules and methods for producing a peptide by culturing such a cell and recovering the peptide or a precursor of the peptide. Recovery of the peptide or precursor may refer to collecting the growth solution and need not involve additional steps of purification. Proteins of the present invention, however, can be purified using standard purification techniques, such as, but not limited to, affinity chromatography, thermaprecipitation, immunoaffinity chromatography, ammonium sulfate precipitation, ion exchange chromatography, filtration, electrophoresis and hydrophobic interaction chromatography.

[0233] The peptides can be purified. Purified peptides are peptides separated from other proteins, lipids, and nucleic acids or from the compounds from which is it synthesized. The polypeptide can constitute at least 10, 20, 50 70, 80 or 95% by dry weight of the purified preparation.

[0234] In a twenty-first aspect, the invention features a method of increasing the level of cyclic guanosine 3′-monophosphate (cGMP) in an organ, tissue (e.g., the intestinal mucosa), or cell (e.g., a cell bearing GC-A receptor) by administering to a patient a composition comprising or consisting essentially of a purified peptide comprising, consisting of or consisting essentially of the amino acid sequence: Xaa₁ Xaa₂ Xaa₃ Xaa₄ Xaa₅ Cys₆ Cys₇ Xaa₈ Xaa₉ Cys₁₀ Cys₁₁ Xaa₁₂ Xaa₁₃ Xaa₁₄ Cys₁₅ Xaa₁₆ Xaa₁₇ Cys₁₈ Xaa₁₉ Xaa₂₀ Xaa₂₁ (I) or Xaa₁ Xaa₂ Xaa₃ Xaa₄ Xaa₅ Cys₆ Cys₇ Xaa₈ Xaa₉ Cys₁₀ Cys₁₁ Asn₁₂ Pro₁₃ Ala₁₄ Cys₁₅ Xaa₁₆ Gly₁₇ Cys₁₈ Xaa₁₉ Xaa₂₀ Xaa₂₁ (II) as described herein.

[0235] In a twenty-second aspect, the invention features polypeptides comprising, consisting or consisting essentially of the amino acid sequence Xaa₁ Xaa₂ Xaa₃ Xaa₄ Xaa₅ Cys₆ Cys₇ Xaa₈ Xaa₉ Cys₁₀ Cys₁₁ Xaa₁₂ Xaa₁₃ Xaa₁₄ Cys₁₅ Xaa₁₆ Xaa₁₇ Cys₁₈ Xaa₁₉ Xaa₂₀ Xaa₂₁ wherein: a) Xaa₈ or Xaa₉ is not present; b) neither Xaa₈ or Xaa₉ is present; c) one of Xaa₁₂, Xaa₁₃ and Xaa₁₄ is not present; d) two of Xaa₁₂, Xaa₁₃ and Xaa₁₄ are not present; e) three of Xaa₁₂, Xaa₁₃ and Xaa₁₄ are not present; f) one of Xaa₁₆ and Xaa₁₇ is not present; g) neither Xaa₁₆ or Xaa₁₇ is present and combinations thereof. In various embodiments, one, two, three, four or five of Xaa₁ Xaa₂ Xaa₃ Xaa₄ and Xaa₅ are not present. In other embodiments, one, two or three or Xaa₁₉ Xaa₂₀ and Xaa₂₁ are missing.

[0236] In twenty third aspect, the invention features a method for treating a disorder ameliorated by increasing cGMP levels, the method comprising administering a pharmaceutical composition comprising, consisting essentially of or consisting of a peptide or agonist of the invention and a pharmaceutically acceptable carrier.

[0237] In a twenty-fourth aspect, the invention features a method for treating hypertension The method comprises: administering to the patient a pharmaceutical composition comprising, consisting essentially of, or consisting of a peptide or agonist of the invention and a pharmaceutically acceptable carrier. The composition can be administered in combination with another agent for treatment of hypertension, for example, a diuretic, an ACE inhibitor, an angiotensin receptor blocker, a beta-blocker, or a calcium channel blocker.

[0238] In a twenty-fifth aspect, the invention features a method for treating secondary hyperglycemias in connection with pancreatic diseases (chronic pancreatitis, pancreasectomy, hemochromatosis) or endocrine diseases (acromegaly, Cushing's syndrome, pheochromocytoma or hyperthyreosis), drug-induced hyperglycemias (benzothiadiazine saluretics, diazoxide or glucocorticoids), pathologic glucose tolerance, hyperglycemias, dyslipoproteinemias, adiposity, hyperlipoproteinemias and/or hypotensions is described. The method comprises: administering to the patient a pharmaceutical composition comprising, consisting essentially of, or consisting of a guanylin potentiating agent and a pharmaceutically acceptable carrier

[0239] Among the useful peptides are peptides comprising, consisting of or consisting essentially of the amino acid sequence Xaa₁ Xaa₂ Xaa₃ Xaa₄ Xaa₅ Cys Cys Glu Xaa₉ Cys Cys Asn Pro Ala Cys Thr Gly Cys Tyr Xaa₂₀ Xaa₂₁ (II) (SEQ ID NO:2) are the following peptides:

| | |
|---|---|
| Gln Ser Ser Asn Tyr Cys Cys Glu Tyr Cys Cys Asn Pro Ala Cys Thr | (SEQ ID NO: ---) |
| Gly Cys Tyr | |
| Asn Thr Ser Asn Tyr Cys Cys Glu Tyr Cys Cys Asn Pro Ala Cys Thr | (SEQ ID NO: ---) |
| Gly Cys Tyr | |
| Asn Leu Ser Asn Tyr Cys Cys Glu Tyr Cys Cys Asn Pro Ala Cys Thr | (SEQ ID NO: ---) |
| Gly Cys Tyr | |
| Asn Ile Ser Asn Tyr Cys Cys Glu Tyr Cys Cys Asn Pro Ala Cys Thr | (SEQ ID NO: ---) |
| Gly Cys Tyr | |
| Asn Ser Ser Gln Tyr Cys Cys Glu Tyr Cys Cys Asn Pro Ala Cys Thr | (SEQ ID NO: ---) |
| Gly Cys Tyr | |
| Ser Ser Asn Tyr Cys Cys Glu Tyr Cys Cys Asn Pro Ala Cys Thr Gly | (SEQ ID NO: ---) |
| Cys Tyr | |
| Gln Ser Ser Gln Tyr Cys Cys Glu Tyr Cys Cys Asn Pro Ala Cys Thr | (SEQ ID NO: ---) |
| Gly Cys Tyr | |
| Ser Ser Gln Tyr Cys Cys Glu Tyr Cys Cys Asn Pro Ala Cys Thr Gly | (SEQ ID NO: ---) |
| Cys Tyr. | |
| Asn Ser Ser Asn Tyr Cys Cys Glu Ala Cys Cys Asn Pro Ala Cys | (SEQ ID NO: ) |
| Thr Gly Cys Tyr | |
| Asn Ser Ser Asn Tyr Cys Cys Glu Arg Cys Cys Asn Pro Ala Cys Thr | (SEQ ID NO: ) |
| Gly Cys Tyr | |
| Asn Ser Ser Asn Tyr Cys Cys Glu Asn Cys Cys Asn Pro Ala Cys Thr | (SEQ ID NO: ) |
| Gly Cys Tyr | |
| Asn Ser Ser Asn Tyr Cys Cys Glu Asp Cys Cys Asn Pro Ala Cys Thr | (SEQ ID NO: ) |
| Gly Cys Tyr | |
| Asn Ser Ser Asn Tyr Cys Cys Glu Cys Cys Cys Asn Pro Ala Cys Thr | (SEQ ID NO: ) |
| Gly Cys Tyr | |
| Asn Ser Ser Asn Tyr Cys Cys Glu Gln Cys Cys Asn Pro Ala Cys Thr | (SEQ ID NO: ) |
| Gly Cys Tyr | |
| Asn Ser Ser Asn Tyr Cys Cys Glu Glu Cys Cys Asn Pro Ala Cys Thr | (SEQ ID NO: ) |
| Gly Cys Tyr | |
| Asn Ser Ser Asn Tyr Cys Cys Glu Gly Cys Cys Asn Pro Ala Cys Thr | (SEQ ID NO: ) |
| Gly Cys Tyr | |
| Asn Ser Ser Asn Tyr Cys Cys Glu His Cys Cys Asn Pro Ala Cys Thr | (SEQ ID NO: ) |
| Gly Cys Tyr | |
| Asn Ser Ser Asn Tyr Cys Cys Glu Ile Cys Cys Asn Pro Ala Cys Thr | (SEQ ID NO: ) |
| Gly Cys Tyr | |
| Asn Ser Ser Asn Tyr Cys Cys Glu Lys Cys Cys Asn Pro Ala Cys Thr | (SEQ ID NO: ) |
| Gly Cys Tyr | |
| Asn Ser Ser Asn Tyr Cys Cys Glu Met Cys Cys Asn Pro Ala Cys Thr | (SEQ ID NO: ) |
| Gly Cys Tyr | |
| Asn Ser Ser Asn Tyr Cys Cys Glu Phe Cys Cys Asn Pro Ala Cys Thr | (SEQ ID NO: ) |
| Gly Cys Tyr | |
| Asn Ser Ser Asn Tyr Cys Cys Glu Pro Cys Cys Asn Pro Ala Cys Thr | (SEQ ID NO: ) |
| Gly Cys Tyr | |
| Asn Ser Ser Asn Tyr Cys Cys Glu Ser Cys Cys Asn Pro Ala Cys Thr | (SEQ ID NO: ) |
| Gly Cys Tyr | |
| Asn Ser Ser Asn Tyr Cys Cys Glu Thr Cys Cys Asn Pro Ala Cys Thr | (SEQ ID NO: ) |
| Gly Cys Tyr | |
| Asn Ser Ser Asn Tyr Cys Cys Glu Trp Cys Cys Asn Pro Ala Cys Thr | (SEQ ID NO: ) |
| Gly Cys Tyr | |
| Asn Ser Ser Asn Tyr Cys Cys Glu Val Cys Cys Asn Pro Ala Cys Thr | (SEQ ID NO: ) |
| Gly Cys Tyr | |
| Cys Cys Glu Ala Cys Cys Asn Pro Ala Cys Thr Gly Cys Tyr | (SEQ ID NO: ) |
| Cys Cys Glu Arg Cys Cys Asn Pro Ala Cys Thr Gly Cys Tyr | (SEQ ID NO: ) |
| Cys Cys Glu Asn Cys Cys Asn Pro Ala Cys Thr Gly Cys Tyr | (SEQ ID NO: ) |
| Cys Cys Glu Asp Cys Cys Asn Pro Ala Cys Thr Gly Cys Tyr | (SEQ ID NO: ) |
| Cys Cys Glu Cys Cys Cys Asn Pro Ala Cys Thr Gly Cys Tyr | (SEQ ID NO: ) |
| Cys Cys Glu Gln Cys Cys Asn Pro Ala Cys Thr Gly Cys Tyr | (SEQ ID NO: ) |
| Cys Cys Glu Glu Cys Cys Asn Pro Ala Cys Thr Gly Cys Tyr | (SEQ ID NO: ) |
| Cys Cys Glu Gly Cys Cys Asn Pro Ala Cys Thr Gly Cys Tyr | (SEQ ID NO: ) |
| Cys Cys Glu His Cys Cys Asn Pro Ala Cys Thr Gly Cys Tyr | (SEQ ID NO: ) |
| Cys Cys Glu Ile Cys Cys Asn Pro Ala Cys Thr Gly Cys Tyr | (SEQ ID NO: ) |
| Cys Cys Glu Lys Cys Cys Asn Pro Ala Cys Thr Gly Cys Tyr | (SEQ ID NO: ) |
| Cys Cys Glu Met Cys Cys Asn Pro Ala Cys Thr Gly Cys Tyr | (SEQ ID NO: ) |
| Cys Cys Glu Phe Cys Cys Asn Pro Ala Cys Thr Gly Cys Tyr | (SEQ ID NO: ) |
| Cys Cys Glu Pro Cys Cys Asn Pro Ala Cys Thr Gly Cys Tyr | (SEQ ID NO: ) |
| Cys Cys Glu Ser Cys Cys Asn Pro Ala Cys Thr Gly Cys Tyr | (SEQ ID NO: ) |
| Cys Cys Glu Thr Cys Cys Asn Pro Ala Cys Thr Gly Cys Tyr | (SEQ ID NO: ) |
| Cys Cys Glu Trp Cys Cys Asn Pro Ala Cys Thr Gly Cys Tyr | (SEQ ID NO: ) |
| Cys Cys Glu Val Cys Cys Asn Pro Ala Cys Thr Gly Cys Tyr | (SEQ ID NO: ) |
| Cys Cys Glu Tyr Cys Cys Asn Pro Ala Cys Thr Gly Cys | (SEQ ID NO: 6) |
| Cys Cys Glu Ala Cys Cys Asn Pro Ala Cys Thr Gly Cys | (SEQ ID NO: ) |
| Cys Cys Glu Arg Cys Cys Asn Pro Ala Cys Thr Gly Cys | (SEQ ID NO: ) |
| Cys Cys Glu Asn Cys Cys Asn Pro Ala Cys Thr Gly Cys | (SEQ ID NO: ) |
| Cys Cys Glu Asp Cys Cys Asn Pro Ala Cys Thr Gly Cys | (SEQ ID NO: ) |
| Cys Cys Glu Cys Cys Cys Asn Pro Ala Cys Thr Gly Cys | (SEQ ID NO: ) |
| Cys Cys Glu Gln Cys Cys Asn Pro Ala Cys Thr Gly Cys | (SEQ ID NO: ) |
| Cys Cys Glu Glu Cys Cys Asn Pro Ala Cys Thr Gly Cys | (SEQ ID NO: ) |
| Cys Cys Glu Gly Cys Cys Asn Pro Ala Cys Thr Gly Cys | (SEQ ID NO: ) |
| Cys Cys Glu His Cys Cys Asn Pro Ala Cys Thr Gly Cys | (SEQ ID NO: ) |
| Cys Cys Glu Ile Cys Cys Asn Pro Ala Cys Thr Gly Cys | (SEQ ID NO: ) |
| Cys Cys Glu Lys Cys Cys Asn Pro Ala Cys Thr Gly Cys | (SEQ ID NO: ) |
| Cys Cys Glu Met Cys Cys Asn Pro Ala Cys Thr Gly Cys | (SEQ ID NO: ) |
| Cys Cys Glu Phe Cys Cys Asn Pro Ala Cys Thr Gly Cys | (SEQ ID NO: ) |
| Cys Cys Glu Pro Cys Cys Asn Pro Ala Cys Thr Gly Cys | (SEQ ID NO: ) |
| Cys Cys Glu Ser Cys Cys Asn Pro Ala Cys Thr Gly Cys | (SEQ ID NO: ) |
| Cys Cys Glu Thr Cys Cys Asn Pro Ala Cys Thr Gly Cys; | (SEQ ID NO: ) |
| Cys Cys Glu Trp Cys Cys Asn Pro Ala Cys Thr Gly Cys | (SEQ ID NO: ) |
| Cys Cys Glu Val Cys Cys Asn Pro Ala Cys Thr Gly Cys. | (SEQ ID NO: ) |

[0240] Also useful are peptides comprising, consisting of or consisting essentially of any of the following sequences:

Cys Cys Glu Leu Cys Cys Ala Pro Ala Cys Thr Gly
Cys Tyr
Cys Cys Glu Leu Cys Cys Val Pro Ala Cys Thr Gly
Cys Tyr
Cys Cys Glu Leu Cys Cys Leu Pro Ala Cys Thr Gly
Cys Tyr
Cys Cys Glu Leu Cys Cys Ile Pro Ala Cys Thr Gly
Cys Tyr
Cys Cys Glu Leu Cys Cys Pro Pro Ala Cys Thr Gly
Cys Tyr
Cys Cys Glu Leu Cys Cys Met Pro Ala Cys Thr Gly
Cys Tyr
Cys Cys Glu Leu Cys Cys Phe Pro Ala Cys Thr Gly
Cys Tyr
Cys Cys Glu Leu Cys Cys Trp Pro Ala Cys Thr Gly
Cys Tyr
Cys Cys Glu Leu Cys Cys Gly Pro Ala Cys Thr Gly
Cys Tyr
Cys Cys Glu Leu Cys Cys Ser Pro Ala Cys Thr Gly
Cys Tyr
Cys Cys Glu Leu Cys Cys Thr Pro Ala Cys Thr Gly
Cys Tyr
Cys Cys Glu Leu Cys Cys Cys Pro Ala Cys Thr Gly
Cys Tyr
Cys Cys Glu Leu Cys Cys Gln Pro Ala Cys Thr Gly
Cys Tyr
Cys Cys Glu Leu Cys Cys Tyr Pro Ala Cys Thr Gly
Cys Tyr
Cys Cys Glu Leu Cys Cys Asp Pro Ala Cys Thr Gly
Cys Tyr
Cys Cys Glu Leu Cys Cys Glu Pro Ala Cys Thr Gly
Cys Tyr
Cys Cys Glu Leu Cys Cys Lys Pro Ala Cys Thr Gly
Cys Tyr
Cys Cys Glu Leu Cys Cys Arg Pro Ala Cys Thr Gly
Cys Tyr
Cys Cys Glu Leu Cys Cys His Pro Ala Cys Thr Gly
Cys Tyr
Cys Cys Glu Tyr Cys Cys Ala Pro Ala Cys Thr Gly
Cys Tyr
Cys Cys Glu Tyr Cys Cys Val Pro Ala Cys Thr Gly
Cys Tyr
Cys Cys Glu Tyr Cys Cys Leu Pro Ala Cys Thr Gly
Cys Tyr
Cys Cys Glu Tyr Cys Cys Ile Pro Ala Cys Thr Gly
Cys Tyr
Cys Cys Glu Tyr Cys Cys Pro Pro Ala Cys Thr Gly
Cys Tyr
Cys Cys Glu Tyr Cys Cys Met Pro Ala Cys Thr Gly
Cys Tyr
Cys Cys Glu Tyr Cys Cys Phe Pro Ala Cys Thr Gly
Cys Tyr
Cys Cys Glu Tyr Cys Cys Trp Pro Ala Cys Thr Gly
Cys Tyr
Cys Cys Glu Tyr Cys Cys Gly Pro Ala Cys Thr Gly
Cys Tyr
Cys Cys Glu Tyr Cys Cys Ser Pro Ala Cys Thr Gly
Cys Tyr
Cys Cys Glu Tyr Cys Cys Thr Pro Ala Cys Thr Gly
Cys Tyr
Cys Cys Glu Tyr Cys Cys Cys Pro Ala Cys Thr Gly
Cys Tyr
Cys Cys Glu Tyr Cys Cys Gln Pro Ala Cys Thr Gly
Cys Tyr
Cys Cys Glu Tyr Cys Cys Tyr Pro Ala Cys Thr Gly
Cys Tyr
Cys Cys Glu Tyr Cys Cys Asp Pro Ala Cys Thr Gly
Cys Tyr
Cys Cys Glu Tyr Cys Cys Glu Pro Ala Cys Thr Gly
Cys Tyr
Cys Cys Glu Tyr Cys Cys Lys Pro Ala Cys Thr Gly
Cys Tyr
Cys Cys Glu Tyr Cys Cys Arg Pro Ala Cys Thr Gly
Cys Tyr
Cys Cys Glu Tyr Cys Cys His Pro Ala Cys Thr Gly
Cys Tyr
Cys Cys Glu Leu Cys Cys Ala Pro Ala Cys Thr Gly
Cys
Cys Cys Glu Leu Cys Cys Val Pro Ala Cys Thr Gly
Cys
Cys Cys Glu Leu Cys Cys Leu Pro Ala Cys Thr Gly
Cys
Cys Cys Glu Leu Cys Cys Ile Pro Ala Cys Thr Gly
Cys
Cys Cys Glu Leu Cys Cys Pro Pro Ala Cys Thr Gly
Cys
Cys Cys Glu Leu Cys Cys Met Pro Ala Cys Thr Gly
Cys
Cys Cys Glu Leu Cys Cys Phe Pro Ala Cys Thr Gly
Cys
Cys Cys Glu Leu Cys Cys Trp Pro Ala Cys Thr Gly
Cys
Cys Cys Glu Leu Cys Cys Gly Pro Ala Cys Thr Gly
Cys
Cys Cys Glu Leu Cys Cys Ser Pro Ala Cys Thr Gly
Cys
Cys Cys Glu Leu Cys Cys Thr Pro Ala Cys Thr Gly
Cys
Cys Cys Glu Leu Cys Cys Cys Pro Ala Cys Thr Gly
Cys
Cys Cys Glu Leu Cys Cys Gln Pro Ala Cys Thr Gly
Cys
Cys Cys Glu Leu Cys Cys Tyr Pro Ala Cys Thr Gly
Cys
Cys Cys Glu Leu Cys Cys Asp Pro Ala Cys Thr Gly
Cys
Cys Cys Glu Leu Cys Cys Glu Pro Ala Cys Thr Gly
Cys
Cys Cys Glu Leu Cys Cys Lys Pro Ala Cys Thr Gly
Cys
Cys Cys Glu Leu Cys Cys Arg Pro Ala Cys Thr Gly
Cys
Cys Cys Glu Leu Cys Cys His Pro Ala Cys Thr Gly
Cys
Cys Cys Glu Tyr Cys Cys Ala Pro Ala Cys Thr Gly
Cys
Cys Cys Glu Tyr Cys Cys Val Pro Ala Cys Thr Gly
Cys
Cys Cys Glu Tyr Cys Cys Leu Pro Ala Cys Thr Gly
Cys
Cys Cys Glu Tyr Cys Cys Ile Pro Ala Cys Thr Gly
Cys
Cys Cys Glu Tyr Cys Cys Pro Pro Ala Cys Thr Gly
Cys
Cys Cys Glu Tyr Cys Cys Met Pro Ala Cys Thr Gly
Cys
Cys Cys Glu Tyr Cys Cys Phe Pro Ala Cys Thr Gly
Cys
Cys Cys Glu Tyr Cys Cys Trp Pro Ala Cys Thr Gly
Cys
Cys Cys Glu Tyr Cys Cys Gly Pro Ala Cys Thr Gly
Cys
Cys Cys Glu Tyr Cys Cys Ser Pro Ala Cys Thr Gly
Cys
Cys Cys Glu Tyr Cys Cys Thr Pro Ala Cys Thr Gly
Cys
Cys Cys Glu Tyr Cys Cys Cys Pro Ala Cys Thr Gly
Cys
Cys Cys Glu Tyr Cys Cys Gln Pro Ala Cys Thr Gly
Cys
Cys Cys Glu Tyr Cys Cys Tyr Pro Ala Cys Thr Gly
Cys
Cys Cys Glu Tyr Cys Cys Asp Pro Ala Cys Thr Gly
Cys
Cys Cys Glu Tyr Cys Cys Glu Pro Ala Cys Thr Gly
Cys
Cys Cys Glu Tyr Cys Cys Lys Pro Ala Cys Thr Gly
Cys
Cys Cys Glu Tyr Cys Cys Arg Pro Ala Cys Thr Gly
Cys
Cys Cys Glu Tyr Cys Cys His Pro Ala Cys Thr Gly
Cys
Cys Cys Glu Leu Cys Cys Asn Pro Thr Cys Thr Gly
Cys Tyr
Cys Cys Glu Tyr Cys Cys Asn Pro Thr Cys Thr Gly
Cys Tyr
Cys Cys Glu Leu Cys Cys Asn Pro Thr Cys Thr Gly
Cys
Cys Cys Glu Tyr Cys Cys Asn Pro Thr Cys Thr Gly
Cys
Cys Cys Glu Phe Cys Cys Asn Pro Thr Cys Thr Gly
Cys Tyr
Cys Cys Glu Phe Cys Cys Asn Pro Thr Cys Thr Gly
Cys
Cys Cys Glu Trp Cys Cys Asn Pro Thr Cys Thr Gly
Cys Tyr
Cys Cys Glu Trp Cys Cys Asn Pro Thr Cys Thr Gly
Cys
Cys Cys Glu Leu Cys Cys Asn Gly Ala Cys Thr Gly
Cys Tyr
Cys Cys Glu Tyr Cys Cys Asn Gly Ala Cys Thr Gly
Cys Tyr
Cys Cys Glu Leu Cys Cys Asn Gly Ala Cys Thr Gly
Cys
Cys Cys Glu Tyr Cys Cys Asn Gly Ala Cys Thr Gly
Cys
Cys Cys Glu Phe Cys Cys Asn Gly Ala Cys Thr Gly
Cys Tyr
Cys Cys Glu Phe Cys Cys Asn Gly Ala Cys Thr Gly
Cys
Cys Cys Glu Trp Cys Cys Asn Gly Ala Cys Thr Gly
Cys Tyr
Cys Cys Glu Trp Cys Cys Asn Gly Ala Cys Thr Gly
Cys
Cys Cys Glu Leu Cys Cys Asn Pro Ala Cys Val Gly
Cys Tyr
Cys Cys Glu Tyr Cys Cys Asn Pro Ala Cys Val Gly
Cys Tyr
Cys Cys Glu Leu Cys Cys Asn Pro Ala Cys Val Gly
Cys
Cys Cys Glu Tyr Cys Cys Asn Pro Ala Cys Val Gly
Cys
Cys Cys Glu Phe Cys Cys Asn Pro Ala Cys Val Gly
Cys Tyr
Cys Cys Glu Phe Cys Cys Asn Pro Ala Cys Val Gly
Cys
Cys Cys Glu Trp Cys Cys Asn Pro Ala Cys Val Gly
Cys Tyr
Cys Cys Glu Trp Cys Cys Asn Pro Ala Cys Val Gly
Cys
Cys Cys Glu Leu Cys Cys Asn Pro Ala Cys Gly Gly
Cys Tyr
Cys Cys Glu Tyr Cys Cys Asn Pro Ala Cys Gly Gly
Cys Tyr
Cys Cys Glu Leu Cys Cys Asn Pro Ala Cys Gly Gly
Cys
Cys Cys Glu Tyr Cys Cys Asn Pro Ala Cys Gly Gly
Cys
Cys Cys Glu Phe Cys Cys Asn Pro Ala Cys Gly Gly
Cys Tyr
Cys Cys Glu Phe Cys Cys Asn Pro Ala Cys Gly Gly
Cys
Cys Cys Glu Trp Cys Cys Asn Pro Ala Cys Gly Gly
Cys Tyr
Cys Cys Glu Trp Cys Cys Asn Pro Ala Cys Gly Gly
Cys
Cys Cys Glu Leu Cys Cys Asn Pro Ala Cys Thr Ala
Cys Tyr
Cys Cys Glu Tyr Cys Cys Asn Pro Ala Cys Thr Ala
Cys Tyr
Cys Cys Glu Leu Cys Cys Asn Pro Ala Cys Thr Ala
Cys
Cys Cys Glu Tyr Cys Cys Asn Pro Ala Cys Thr Ala
Cys
Cys Cys Glu Trp Cys Cys Asn Pro Ala Cys Thr Ala
Cys Tyr
Cys Cys Glu Trp Cys Cys Asn Pro Ala Cys Thr Ala
Cys
Cys Cys Glu Phe Cys Cys Asn Pro Ala Cys Thr Ala
Cys Tyr
Cys Cys Glu Phe Cys Cys Asn Pro Ala Cys Thr Ala
Cys
Cys Cys Glu Leu Cys Cys Asn Pro Ala Cys Thr Gly
Cys Ala
Cys Cys Glu Leu Cys Cys Asn Pro Ala Cys Thr Gly
Cys Val
Cys Cys Glu Leu Cys Cys Asn Pro Ala Cys Thr Gly
Cys Leu
Cys Cys Glu Leu Cys Cys Asn Pro Ala Cys Thr Gly
Cys Ile
Cys Cys Glu Leu Cys Cys Asn Pro Ala Cys Thr Gly
Cys Pro
Cys Cys Glu Leu Cys Cys Asn Pro Ala Cys Thr Gly
Cys Met
Cys Cys Glu Leu Cys Cys Asn Pro Ala Cys Thr Gly
Cys Phe
Cys Cys Glu Leu Cys Cys Asn Pro Ala Cys Thr Gly
Cys Trp
Cys Cys Glu Leu Cys Cys Asn Pro Ala Cys Thr Gly
Cys Gly
Cys Cys Glu Leu Cys Cys Asn Pro Ala Cys Thr Gly
Cys Ser
Cys Cys Glu Leu Cys Cys Asn Pro Ala Cys Thr Gly
Cys Thr
Cys Cys Glu Leu Cys Cys Asn Pro Ala Cys Thr Gly
Cys Cys
Cys Cys Glu Leu Cys Cys Asn Pro Ala Cys Thr Gly
Cys Asn
Cys Cys Glu Leu Cys Cys Asn Pro Ala Cys Thr Gly
Cys Gln
Cys Cys Glu Leu Cys Cys Asn Pro Ala Cys Thr Gly
Cys Asp
Cys Cys Glu Leu Cys Cys Asn Pro Ala Cys Thr Gly
Cys Glu
Cys Cys Glu Leu Cys Cys Asn Pro Ala Cys Thr Gly
Cys Lys
Cys Cys Glu Leu Cys Cys Asn Pro Ala Cys Thr Gly
Cys Arg
Cys Cys Glu Leu Cys Cys Asn Pro Ala Cys Thr Gly
Cys His
Cys Cys Glu Tyr Cys Cys Asn Pro Ala Cys Thr Gly
Cys Ala
Cys Cys Glu Tyr Cys Cys Asn Pro Ala Cys Thr Gly
Cys Val
Cys Cys Glu Tyr Cys Cys Asn Pro Ala Cys Thr Gly
Cys Leu
Cys Cys Glu Tyr Cys Cys Asn Pro Ala Cys Thr Gly
Cys Ile
Cys Cys Glu Tyr Cys Cys Asn Pro Ala Cys Thr Gly
Cys Pro
Cys Cys Glu Tyr Cys Cys Asn Pro Ala Cys Thr Gly
Cys Met
Cys Cys Glu Tyr Cys Cys Asn Pro Ala Cys Thr Gly
Cys Phe
Cys Cys Glu Tyr Cys Cys Asn Pro Ala Cys Thr Gly
Cys Trp
Cys Cys Glu Tyr Cys Cys Asn Pro Ala Cys Thr Gly
Cys Gly
Cys Cys Glu Tyr Cys Cys Asn Pro Ala Cys Thr Gly
Cys Ser
Cys Cys Glu Tyr Cys Cys Asn Pro Ala Cys Thr Gly
Cys Thr
Cys Cys Glu Tyr Cys Cys Asn Pro Ala Cys Thr Gly
Cys Cys
Cys Cys Glu Tyr Cys Cys Asn Pro Ala Cys Thr Gly
Cys Asn
Cys Cys Glu Tyr Cys Cys Asn Pro Ala Cys Thr Gly
Cys Gln
Cys Cys Glu Tyr Cys Cys Asn Pro Ala Cys Thr Gly
Cys Asp
Cys Cys Glu Tyr Cys Cys Asn Pro Ala Cys Thr Gly
Cys Glu
Cys Cys Glu Tyr Cys Cys Asn Pro Ala Cys Thr Gly
Cys Lys
Cys Cys Glu Tyr Cys Cys Asn Pro Ala Cys Thr Gly
Cys Arg
Cys Cys Glu Tyr Cys Cys Asn Pro Ala Cys Thr Gly
Cys His
Cys Cys Ala Leu Cys Cys Asn Pro Ala Cys Thr Gly
Cys Tyr
Cys Cys Val Leu Cys Cys Asn Pro Ala Cys Thr Gly
Cys Tyr
Cys Cys Leu Leu Cys Cys Asn Pro Ala Cys Thr Gly
Cys Tyr
Cys Cys Ile Leu Cys Cys Asn Pro Ala Cys Thr Gly
Cys Tyr
Cys Cys Met Leu Cys Cys Asn Pro Ala Cys Thr Gly
Cys Tyr
Cys Cys Phe Leu Cys Cys Asn Pro Ala Cys Thr Gly
Cys Tyr
Cys Cys Trp Leu Cys Cys Asn Pro Ala Cys Thr Gly
Cys Tyr
Cys Cys Gly Leu Cys Cys Asn Pro Ala Cys Thr Gly
Cys Tyr
Cys Cys Ser Leu Cys Cys Asn Pro Ala Cys Thr Gly
Cys Tyr
Cys Cys Thr Leu Cys Cys Asn Pro Ala Cys Thr Gly
Cys Tyr
Cys Cys Cys Leu Cys Cys Asn Pro Ala Cys Thr Gly
Cys Tyr
Cys Cys Asn Leu Cys Cys Asn Pro Ala Cys Thr Gly
Cys Tyr
Cys Cys Gln Leu Cys Cys Asn Pro Ala Cys Thr Gly
Cys Tyr
Cys Cys Tyr Leu Cys Cys Asn Pro Ala Cys Thr Gly
Cys Tyr
Cys Cys Asp Leu Cys Cys Asn Pro Ala Cys Thr Gly
Cys Tyr
Cys Cys Lys Leu Cys Cys Asn Pro Ala Cys Thr Gly
Cys Tyr
Cys Cys Arg Leu Cys Cys Asn Pro Ala Cys Thr Gly
Cys Tyr
Cys Cys His Leu Cys Cys Asn Pro Ala Cys Thr Gly
Cys Tyr
Cys Cys Ala Leu Cys Cys Asn Pro Ala Cys Thr Gly
Cys
Cys Cys Val Leu Cys Cys Asn Pro Ala Cys Thr Gly
Cys
Cys Cys Leu Leu Cys Cys Asn Pro Ala Cys Thr Gly
Cys
Cys Cys Ile Leu Cys Cys Asn Pro Ala Cys Thr Gly
Cys
Cys Cys Met Leu Cys Cys Asn Pro Ala Cys Thr Gly
Cys
Cys Cys Phe Leu Cys Cys Asn Pro Ala Cys Thr Gly
Cys
Cys Cys Trp Leu Cys Cys Asn Pro Ala Cys Thr Gly
Cys
Cys Cys Gly Leu Cys Cys Asn Pro Ala Cys Thr Gly
Cys
Cys Cys Ser Leu Cys Cys Asn Pro Ala Cys Thr Gly
Cys
Cys Cys Thr Leu Cys Cys Asn Pro Ala Cys Thr Gly
Cys
Cys Cys Cys Leu Cys Cys Asn Pro Ala Cys Thr Gly
Cys
Cys Cys Asn Leu Cys Cys Asn Pro Ala Cys Thr Gly
Cys
Cys Cys Gln Leu Cys Cys Asn Pro Ala Cys Thr Gly
Cys
Cys Cys Tyr Leu Cys Cys Asn Pro Ala Cys Thr Gly
Cys
Cys Cys Asp Leu Cys Cys Asn Pro Ala Cys Thr Gly
Cys
Cys Cys Lys Leu Cys Cys Asn Pro Ala Cys Thr Gly
Cys
Cys Cys Arg Leu Cys Cys Asn Pro Ala Cys Thr Gly
Cys
Cys Cys His Leu Cys Cys Asn Pro Ala Cys Thr Gly
Cys
Cys Cys Ala Tyr Cys Cys Asn Pro Ala Cys Thr Gly
Cys Tyr
Cys Cys Val Tyr Cys Cys Asn Pro Ala Cys Thr Gly
Cys Tyr
Cys Cys Leu Tyr Cys Cys Asn Pro Ala Cys Thr Gly
Cys Tyr
Cys Cys Ile Tyr Cys Cys Asn Pro Ala Cys Thr Gly
Cys Tyr
Cys Cys Met Tyr Cys Cys Asn Pro Ala Cys Thr Gly
Cys Tyr
Cys Cys Phe Tyr Cys Cys Asn Pro Ala Cys Thr Gly
Cys Tyr
Cys Cys Trp Tyr Cys Cys Asn Pro Ala Cys Thr Gly
Cys Tyr
Cys Cys Gly Tyr Cys Cys Asn Pro Ala Cys Thr Gly
Cys Tyr
Cys Cys Ser Tyr Cys Cys Asn Pro Ala Cys Thr Gly
Cys Tyr
Cys Cys Thr Tyr Cys Cys Asn Pro Ala Cys Thr Gly
Cys Tyr
Cys Cys Cys Tyr Cys Cys Asn Pro Ala Cys Thr Gly
Cys Tyr
Cys Cys Asn Tyr Cys Cys Asn Pro Ala Cys Thr Gly
Cys Tyr
Cys Cys Gln Tyr Cys Cys Asn Pro Ala Cys Thr Gly
Cys Tyr
Cys Cys Tyr Tyr Cys Cys Asn Pro Ala Cys Thr Gly
Cys Tyr
Cys Cys Asp Tyr Cys Cys Asn Pro Ala Cys Thr Gly
Cys Tyr
Cys Cys Lys Tyr Cys Cys Asn Pro Ala Cys Thr Gly
Cys Tyr
Cys Cys Arg Tyr Cys Cys Asn Pro Ala Cys Thr Gly
Cys Tyr
Cys Cys His Tyr Cys Cys Asn Pro Ala Cys Thr Gly
Cys Tyr
Cys Cys Ala Tyr Cys Cys Asn Pro Ala Cys Thr Gly
Cys
Cys Cys Val Tyr Cys Cys Asn Pro Ala Cys Thr Gly
Cys
Cys Cys Leu Tyr Cys Cys Asn Pro Ala Cys Thr Gly
Cys
Cys Cys Ile Tyr Cys Cys Asn Pro Ala Cys Thr Gly
Cys
Cys Cys Met Tyr Cys Cys Asn Pro Ala Cys Thr Gly
Cys
Cys Cys Phe Tyr Cys Cys Asn Pro Ala Cys Thr Gly
Cys
Cys Cys Trp Tyr Cys Cys Asn Pro Ala Cys Thr Gly
Cys
Cys Cys Gly Tyr Cys Cys Asn Pro Ala Cys Thr Gly
Cys
Cys Cys Ser Tyr Cys Cys Asn Pro Ala Cys Thr Gly
Cys
Cys Cys Thr Tyr Cys Cys Asn Pro Ala Cys Thr Gly
Cys
Cys Cys Cys Tyr Cys Cys Asn Pro Ala Cys Thr Gly
Cys
Cys Cys Asn Tyr Cys Cys Asn Pro Ala Cys Thr Gly
Cys
Cys Cys Gln Tyr Cys Cys Asn Pro Ala Cys Thr Gly
Cys
Cys Cys Tyr Tyr Cys Cys Asn Pro Ala Cys Thr Gly
Cys
Cys Cys Asp Tyr Cys Cys Asn Pro Ala Cys Thr Gly
Cys
Cys Cys Lys Tyr Cys Cys Asn Pro Ala Cys Thr Gly
Cys
Cys Cys Arg Tyr Cys Cys Asn Pro Ala Cys Thr Gly
Cys
Cys Cys His Tyr Cys Cys Asn Pro Ala Cys Thr Gly
Cys
Cys Cys Glu Phe Cys Cys Ala Pro Ala Cys Thr Gly
Cys Tyr
Cys Cys Glu Phe Cys Cys Val Pro Ala Cys Thr Gly
Cys Tyr
Cys Cys Glu Phe Cys Cys Leu Pro Ala Cys Thr Gly
Cys Tyr
Cys Cys Glu Phe Cys Cys Ile Pro Ala Cys Thr Gly
Cys Tyr
Cys Cys Glu Phe Cys Cys Pro Pro Ala Cys Thr Gly
Cys Tyr
Cys Cys Glu Phe Cys Cys Met Pro Ala Cys Thr Gly
Cys Tyr
Cys Cys Glu Phe Cys Cys Phe Pro Ala Cys Thr Gly
Cys Tyr
Cys Cys Glu Phe Cys Cys Trp Pro Ala Cys Thr Gly
Cys Tyr
Cys Cys Glu Phe Cys Cys Gly Pro Ala Cys Thr Gly
Cys Tyr
Cys Cys Glu Phe Cys Cys Ser Pro Ala Cys Thr Gly
Cys Tyr
Cys Cys Glu Phe Cys Cys Thr Pro Ala Cys Thr Gly
Cys Tyr
Cys Cys Glu Phe Cys Cys Cys Pro Ala Cys Thr Gly
Cys Tyr
Cys Cys Glu Phe Cys Cys Gln Pro Ala Cys Thr Gly
Cys Tyr
Cys Cys Glu Phe Cys Cys Tyr Pro Ala Cys Thr Gly
Cys Tyr
Cys Cys Glu Phe Cys Cys Asp Pro Ala Cys Thr Gly
Cys Tyr
Cys Cys Glu Phe Cys Cys Glu Pro Ala Cys Thr Gly
Cys Tyr
Cys Cys Glu Phe Cys Cys Lys Pro Ala Cys Thr Gly
Cys Tyr
Cys Cys Glu Phe Cys Cys Arg Pro Ala Cys Thr Gly
Cys Tyr
Cys Cys Glu Phe Cys Cys His Pro Ala Cys Thr Gly
Cys Tyr
Cys Cys Glu Phe Cys Cys Ala Pro Ala Cys Thr Gly
Cys
Cys Cys Glu Phe Cys Cys Val Pro Ala Cys Thr Gly
Cys
Cys Cys Glu Phe Cys Cys Leu Pro Ala Cys Thr Gly
Cys
Cys Cys Glu Phe Cys Cys Ile Pro Ala Cys Thr Gly
Cys
Cys Cys Glu Phe Cys Cys Pro Pro Ala Cys Thr Gly
Cys
Cys Cys Glu Phe Cys Cys Met Pro Ala Cys Thr Gly
Cys
Cys Cys Glu Phe Cys Cys Phe Pro Ala Cys Thr Gly
Cys
Cys Cys Glu Phe Cys Cys Trp Pro Ala Cys Thr Gly
Cys
Cys Cys Glu Phe Cys Cys Gly Pro Ala Cys Thr Gly
Cys
Cys Cys Glu Phe Cys Cys Ser Pro Ala Cys Thr Gly
Cys
Cys Cys Glu Phe Cys Cys Thr Pro Ala Cys Thr Gly
Cys
Cys Cys Glu Phe Cys Cys Cys Pro Ala Cys Thr Gly
Cys
Cys Cys Glu Phe Cys Cys Gln Pro Ala Cys Thr Gly
Cys
Cys Cys Glu Phe Cys Cys Tyr Pro Ala Cys Thr Gly
Cys
Cys Cys Glu Phe Cys Cys Asp Pro Ala Cys Thr Gly
Cys
Cys Cys Glu Phe Cys Cys Glu Pro Ala Cys Thr Gly
Cys
Cys Cys Glu Phe Cys Cys Lys Pro Ala Cys Thr Gly
Cys
Cys Cys Glu Phe Cys Cys Arg Pro Ala Cys Thr Gly
Cys
Cys Cys Glu Phe Cys Cys His Pro Ala Cys Thr Gly
Cys
Cys Cys Glu Trp Cys Cys Ala Pro Ala Cys Thr Gly
Cys Tyr
Cys Cys Glu Trp Cys Cys Val Pro Ala Cys Thr Gly
Cys Tyr
Cys Cys Glu Trp Cys Cys Leu Pro Ala Cys Thr Gly
Cys Tyr
Cys Cys Glu Trp Cys Cys Ile Pro Ala Cys Thr Gly
Cys Tyr
Cys Cys Glu Trp Cys Cys Pro Pro Ala Cys Thr Gly
Cys Tyr
Cys Cys Glu Trp Cys Cys Met Pro Ala Cys Thr Gly
Cys Tyr
Cys Cys Glu Trp Cys Cys Phe Pro Ala Cys Thr Gly
Cys Tyr
Cys Cys Glu Trp Cys Cys Trp Pro Ala Cys Thr Gly
Cys Tyr
Cys Cys Glu Trp Cys Cys Gly Pro Ala Cys Thr Gly
Cys Tyr
Cys Cys Glu Trp Cys Cys Ser Pro Ala Cys Thr Gly
Cys Tyr
Cys Cys Glu Trp Cys Cys Thr Pro Ala Cys Thr Gly
Cys Tyr
Cys Cys Glu Trp Cys Cys Cys Pro Ala Cys Thr Gly
Cys Tyr
Cys Cys Glu Trp Cys Cys Gln Pro Ala Cys Thr Gly
Cys Tyr
Cys Cys Glu Trp Cys Cys Tyr Pro Ala Cys Thr Gly
Cys Tyr
Cys Cys Glu Trp Cys Cys Asp Pro Ala Cys Thr Gly
Cys Tyr
Cys Cys Glu Trp Cys Cys Glu Pro Ala Cys Thr Gly
Cys Tyr
Cys Cys Glu Trp Cys Cys Lys Pro Ala Cys Thr Gly
Cys Tyr
Cys Cys Glu Trp Cys Cys Arg Pro Ala Cys Thr Gly
Cys Tyr
Cys Cys Glu Trp Cys Cys His Pro Ala Cys Thr Gly
Cys Tyr
Cys Cys Glu Trp Cys Cys Ala Pro Ala Cys Thr Gly
Cys
Cys Cys Glu Trp Cys Cys Val Pro Ala Cys Thr Gly
Cys
Cys Cys Glu Trp Cys Cys Leu Pro Ala Cys Thr Gly
Cys
Cys Cys Glu Trp Cys Cys Ile Pro Ala Cys Thr Gly
Cys
Cys Cys Glu Trp Cys Cys Pro Pro Ala Cys Thr Gly
Cys
Cys Cys Glu Trp Cys Cys Met Pro Ala Cys Thr Gly
Cys
Cys Cys Glu Trp Cys Cys Phe Pro Ala Cys Thr Gly
Cys
Cys Cys Glu Trp Cys Cys Trp Pro Ala Cys Thr Gly
Cys
Cys Cys Glu Trp Cys Cys Gly Pro Ala Cys Thr Gly
Cys
Cys Cys Glu Trp Cys Cys Ser Pro Ala Cys Thr Gly
Cys
Cys Cys Glu Trp Cys Cys Thr Pro Ala Cys Thr Gly
Cys
Cys Cys Glu Trp Cys Cys Cys Pro Ala Cys Thr Gly
Cys
Cys Cys Glu Trp Cys Cys Gln Pro Ala Cys Thr Gly
Cys
Cys Cys Glu Trp Cys Cys Tyr Pro Ala Cys Thr Gly
Cys
Cys Cys Glu Trp Cys Cys Asp Pro Ala Cys Thr Gly
Cys
Cys Cys Glu Trp Cys Cys Glu Pro Ala Cys Thr Gly
Cys
Cys Cys Glu Trp Cys Cys Lys Pro Ala Cys Thr Gly
Cys
Cys Cys Glu Trp Cys Cys Arg Pro Ala Cys Thr Gly
Cys
Cys Cys Glu Trp Cys Cys His Pro Ala Cys Thr Gly
Cys
Cys Cys Glu Trp Cys Cys Asn Pro Ala Cys Thr Gly
Cys Ala
Cys Cys Glu Trp Cys Cys Asn Pro Ala Cys Thr Gly
Cys Val
Cys Cys Glu Trp Cys Cys Asn Pro Ala Cys Thr Gly
Cys Leu
Cys Cys Glu Trp Cys Cys Asn Pro Ala Cys Thr Gly
Cys Ile
Cys Cys Glu Trp Cys Cys Asn Pro Ala Cys Thr Gly
Cys Pro
Cys Cys Glu Trp Cys Cys Asn Pro Ala Cys Thr Gly
Cys Met
Cys Cys Glu Trp Cys Cys Asn Pro Ala Cys Thr Gly
Cys Phe
Cys Cys Glu Trp Cys Cys Asn Pro Ala Cys Thr Gly
Cys Trp
Cys Cys Glu Trp Cys Cys Asn Pro Ala Cys Thr Gly
Cys Gly
Cys Cys Glu Trp Cys Cys Asn Pro Ala Cys Thr Gly
Cys Ser
Cys Cys Glu Trp Cys Cys Asn Pro Ala Cys Thr Gly
Cys Thr
Cys Cys Glu Trp Cys Cys Asn Pro Ala Cys Thr Gly
Cys Cys
Cys Cys Glu Trp Cys Cys Asn Pro Ala Cys Thr Gly
Cys Asn
Cys Cys Glu Trp Cys Cys Asn Pro Ala Cys Thr Gly
Cys Gln
Cys Cys Glu Trp Cys Cys Asn Pro Ala Cys Thr Gly
Cys Asp
Cys Cys Glu Trp Cys Cys Asn Pro Ala Cys Thr Gly
Cys Glu
Cys Cys Glu Trp Cys Cys Asn Pro Ala Cys Thr Gly
Cys Lys
Cys Cys Glu Trp Cys Cys Asn Pro Ala Cys Thr Gly
Cys Arg
Cys Cys Glu Trp Cys Cys Asn Pro Ala Cys Thr Gly
Cys His
Cys Cys Glu Phe Cys Cys Asn Pro Ala Cys Thr Gly
Cys Ala
Cys Cys Glu Phe Cys Cys Asn Pro Ala Cys Thr Gly
Cys Val
Cys Cys Glu Phe Cys Cys Asn Pro Ala Cys Thr Gly
Cys Leu
Cys Cys Glu Phe Cys Cys Asn Pro Ala Cys Thr Gly
Cys Ile
Cys Cys Glu Phe Cys Cys Asn Pro Ala Cys Thr Gly
Cys Pro
Cys Cys Glu Phe Cys Cys Asn Pro Ala Cys Thr Gly
Cys Met
Cys Cys Glu Phe Cys Cys Asn Pro Ala Cys Thr Gly
Cys Phe
Cys Cys Glu Phe Cys Cys Asn Pro Ala Cys Thr Gly
Cys Trp
Cys Cys Glu Phe Cys Cys Asn Pro Ala Cys Thr Gly
Cys Gly
Cys Cys Glu Phe Cys Cys Asn Pro Ala Cys Thr Gly
Cys Ser
Cys Cys Glu Phe Cys Cys Asn Pro Ala Cys Thr Gly
Cys Thr
Cys Cys Glu Phe Cys Cys Asn Pro Ala Cys Thr Gly
Cys Cys
Cys Cys Glu Phe Cys Cys Asn Pro Ala Cys Thr Gly
Cys Asn
Cys Cys Glu Phe Cys Cys Asn Pro Ala Cys Thr Gly
Cys Gln
Cys Cys Glu Phe Cys Cys Asn Pro Ala Cys Thr Gly
Cys Asp
Cys Cys Glu Phe Cys Cys Asn Pro Ala Cys Thr Gly
Cys Glu
Cys Cys Glu Phe Cys Cys Asn Pro Ala Cys Thr Gly
Cys Lys
Cys Cys Glu Phe Cys Cys Asn Pro Ala Cys Thr Gly
Cys Arg
Cys Cys Glu Phe Cys Cys Asn Pro Ala Cys Thr Gly
Cys His
Cys Cys Ala Phe Cys Cys Asn Pro Ala Cys Thr Gly
Cys Tyr
Cys Cys Val Phe Cys Cys Asn Pro Ala Cys Thr Gly
Cys Tyr
Cys Cys Leu Phe Cys Cys Asn Pro Ala Cys Thr Gly
Cys Tyr
Cys Cys Ile Phe Cys Cys Asn Pro Ala Cys Thr Gly
Cys Tyr
Cys Cys Met Phe Cys Cys Asn Pro Ala Cys Thr Gly
Cys Tyr
Cys Cys Phe Phe Cys Cys Asn Pro Ala Cys Thr Gly
Cys Tyr
Cys Cys Trp Phe Cys Cys Asn Pro Ala Cys Thr Gly
Cys Tyr
Cys Cys Gly Phe Cys Cys Asn Pro Ala Cys Thr Gly
Cys Tyr
Cys Cys Ser Phe Cys Cys Asn Pro Ala Cys Thr Gly
Cys Tyr
Cys Cys Thr Phe Cys Cys Asn Pro Ala Cys Thr Gly
Cys Tyr
Cys Cys Cys Phe Cys Cys Asn Pro Ala Cys Thr Gly
Cys Tyr
Cys Cys Asn Phe Cys Cys Asn Pro Ala Cys Thr Gly
Cys Tyr
Cys Cys Gln Phe Cys Cys Asn Pro Ala Cys Thr Gly
Cys Tyr
Cys Cys Tyr Phe Cys Cys Asn Pro Ala Cys Thr Gly
Cys Tyr
Cys Cys Asp Phe Cys Cys Asn Pro Ala Cys Thr Gly
Cys Tyr
Cys Cys Lys Phe Cys Cys Asn Pro Ala Cys Thr Gly
Cys Tyr
Cys Cys Arg Phe Cys Cys Asn Pro Ala Cys Thr Gly
Cys Tyr
Cys Cys His Phe Cys Cys Asn Pro Ala Cys Thr Gly
Cys Tyr
Cys Cys Ala Phe Cys Cys Asn Pro Ala Cys Thr Gly
Cys
Cys Cys Val Phe Cys Cys Asn Pro Ala Cys Thr Gly
Cys
Cys Cys Leu Phe Cys Cys Asn Pro Ala Cys Thr Gly
Cys
Cys Cys Ile Phe Cys Cys Asn Pro Ala Cys Thr Gly
Cys
Cys Cys Met Phe Cys Cys Asn Pro Ala Cys Thr Gly
Cys
Cys Cys Phe Phe Cys Cys Asn Pro Ala Cys Thr Gly
Cys
Cys Cys Trp Phe Cys Cys Asn Pro Ala Cys Thr Gly
Cys
Cys Cys Gly Phe Cys Cys Asn Pro Ala Cys Thr Gly
Cys
Cys Cys Ser Phe Cys Cys Asn Pro Ala Cys Thr Gly
Cys
Cys Cys Thr Phe Cys Cys Asn Pro Ala Cys Thr Gly
Cys
Cys Cys Cys Phe Cys Cys Asn Pro Ala Cys Thr Gly
Cys
Cys Cys Asn Phe Cys Cys Asn Pro Ala Cys Thr Gly
Cys
Cys Cys Gln Phe Cys Cys Asn Pro Ala Cys Thr Gly
Cys
Cys Cys Tyr Phe Cys Cys Asn Pro Ala Cys Thr Gly
Cys
Cys Cys Asp Phe Cys Cys Asn Pro Ala Cys Thr Gly
Cys
Cys Cys Lys Phe Cys Cys Asn Pro Ala Cys Thr Gly
Cys
Cys Cys Arg Phe Cys Cys Asn Pro Ala Cys Thr Gly
Cys
Cys Cys His Phe Cys Cys Asn Pro Ala Cys Thr Gly
Cys
Cys Cys Ala Trp Cys Cys Asn Pro Ala Cys Thr Gly
Cys Tyr
Cys Cys Val Trp Cys Cys Asn Pro Ala Cys Thr Gly
Cys Tyr
Cys Cys Leu Trp Cys Cys Asn Pro Ala Cys Thr Gly
Cys Tyr
Cys Cys Ile Trp Cys Cys Asn Pro Ala Cys Thr Gly
Cys Tyr
Cys Cys Met Trp Cys Cys Asn Pro Ala Cys Thr Gly
Cys Tyr
Cys Cys Phe Trp Cys Cys Asn Pro Ala Cys Thr Gly
Cys Tyr
Cys Cys Trp Trp Cys Cys Asn Pro Ala Cys Thr Gly
Cys Tyr
Cys Cys Gly Trp Cys Cys Asn Pro Ala Cys Thr Gly
Cys Tyr
Cys Cys Ser Trp Cys Cys Asn Pro Ala Cys Thr Gly
Cys Tyr
Cys Cys Thr Trp Cys Cys Asn Pro Ala Cys Thr Gly
Cys Tyr
Cys Cys Cys Trp Cys Cys Asn Pro Ala Cys Thr Gly
Cys Tyr
Cys Cys Asn Trp Cys Cys Asn Pro Ala Cys Thr Gly
Cys Tyr
Cys Cys Gln Trp Cys Cys Asn Pro Ala Cys Thr Gly
Cys Tyr
Cys Cys Tyr Trp Cys Cys Asn Pro Ala Cys Thr Gly
Cys Tyr
Cys Cys Asp Trp Cys Cys Asn Pro Ala Cys Thr Gly
Cys Tyr
Cys Cys Lys Trp Cys Cys Asn Pro Ala Cys Thr Gly
Cys Tyr
Cys Cys Arg Trp Cys Cys Asn Pro Ala Cys Thr Gly
Cys Tyr
Cys Cys His Trp Cys Cys Asn Pro Ala Cys Thr Gly
Cys Tyr
Cys Cys Ala Trp Cys Cys Asn Pro Ala Cys Thr Gly
Cys
Cys Cys Val Trp Cys Cys Asn Pro Ala Cys Thr Gly
Cys
Cys Cys Leu Trp Cys Cys Asn Pro Ala Cys Thr Gly
Cys
Cys Cys Ile Trp Cys Cys Asn Pro Ala Cys Thr Gly
Cys
Cys Cys Met Trp Cys Cys Asn Pro Ala Cys Thr Gly
Cys
Cys Cys Phe Trp Cys Cys Asn Pro Ala Cys Thr Gly
Cys
Cys Cys Trp Trp Cys Cys Asn Pro Ala Cys Thr Gly
Cys
Cys Cys Gly Trp Cys Cys Asn Pro Ala Cys Thr Gly
Cys
Cys Cys Ser Trp Cys Cys Asn Pro Ala Cys Thr Gly
Cys
Cys Cys Thr Trp Cys Cys Asn Pro Ala Cys Thr Gly
Cys
Cys Cys Cys Trp Cys Cys Asn Pro Ala Cys Thr Gly
Cys
Cys Cys Asn Trp Cys Cys Asn Pro Ala Cys Thr Gly
Cys
Cys Cys Gln Trp Cys Cys Asn Pro Ala Cys Thr Gly
Cys
Cys Cys Tyr Trp Cys Cys Asn Pro Ala Cys Thr Gly
Cys
Cys Cys Asp Trp Cys Cys Asn Pro Ala Cys Thr Gly
Cys
Cys Cys Lys Trp Cys Cys Asn Pro Ala Cys Thr Gly
Cys
Cys Cys Arg Trp Cys Cys Asn Pro Ala Cys Thr Gly
Cys
Cys Cys His Trp Cys Cys Asn Pro Ala Cys Thr Gly
Cys

[0241] Additional useful peptides include:

| | |
|---|---|
| Cys Glu Leu Cys Ile Asn Val Ala Cys Thr Gly Cys | |
| Cys Glu Leu Cys Val Asn Val Ala Cys Thr Gly Cys | |
| Cys Ala Glu Leu Cys Cys Asn Pro Ala Cys | |
| Cys Cys Gly Leu Cys Cys Asn Pro Ala Cys Ala Gly Cys | |
| Cys Cys Gly Leu Cys Cys Tyr Pro Ala Cys Ala Gly Cys | |
| Cys Glu Leu Cys Cys Asn Pro Ala Cys Ala Gly Cys | |
| Cys Cys Asp Val Cys Cys Tyr Pro Ala Cys Thr Gly Cys | |
| Cys Cys Glu Leu Cys Cys Asn Pro Ala Cys Ala Gly Cys | |
| Cys Cys Glu Leu Cys Cys Tyr Pro Ala Cys Ala Gly Cys | |
| Cys Cys Glu Leu Cys Cys Asn Pro Ala Cys Thr Gly Cys | |
| Cys Cys Glu Leu Cys Cys Tyr Pro Ala Cys Thr Gly Cys | |
| Cys Cys Glu Leu Cys Cys Asn Pro Gly Cys Thr Gly Cys | |
| Cys Cys Glu Ala Cys Cys Asn Pro Ala Cys Thr Gly Cys | |
| Cys Cys Glu Lys Cys Cys Asn Pro Ala Cys Thr Gly Cys | |
| Cys Cys Glu Leu Cys Cys Asn Pro Ala Cys Thr Ala Cys | |
| Cys Cys Pro Leu Cys Cys Asn Pro Ala Cys Thr Gly Cys | |
| Ala Cys Glu Leu Cys Ala Asn Pro Ala Cys Thr Gly Cys | |
| Cys Cys Glu Leu Ala Cys Asn Pro Ala Cys Thr Gly Ala | |
| Cys Glu Leu Cys Ala Asn Pro Ala Cys Thr Gly Cys | |
| Cys Cys Glu Leu Ala Cys Asn Pro Ala Cys | |
| Cys Cys Asp Val Cys Cys Asn Pro Ala Cys Ala Gly Cys | |
| Cys Cys Asp Val Cys Cys Asn Pro Ala Cys Thr Gly Cys | |
| Cys Cys Asp Val Cys Cys Asn Pro Ala Cys Ala Gly Cys Tyr | |
| Cys Cys Asp Val Cys Cys Asn Pro Ala Cys Thr Gly Cys Tyr | |
| Cys Cys Glu Leu Cys Cys Tyr Pro Ala Cys Ala Gly Cys | |
| Cys Cys Ile Cys Cys Asn Pro Ala Cys Phe Gly Cys | |
| Cys Cys Asn Tyr Cys Cys Ser Pro Cys Gly Cys | |
| Cys Cys Asp Val Cys Cys Asn Pro Ala Cys Ala Gly Cys | (SEQ ID NO. ) |
| Cys Cys Asp Ala Cys Cys Asn Pro Ala Cys Ala Gly Cys | (SEQ ID NO. ) |
| Cys Cys Asp Cys Cys Cys Asn Pro Ala Cys Ala Gly Cys | (SEQ ID NO. ) |
| Cys Cys Asp Asp Cys Cys Asn Pro Ala Cys Ala Gly Cys | (SEQ ID NO. ) |
| Cys Cys Asp Glu Cys Cys Asn Pro Ala Cys Ala Gly Cys | (SEQ ID NO. ) |
| Cys Cys Asp Phe Cys Cys Asn Pro Ala Cys Ala Gly Cys | (SEQ ID NO. ) |
| Cys Cys Asp Gly Cys Cys Asn Pro Ala Cys Ala Gly Cys | (SEQ ID NO. ) |
| Cys Cys Asp His Cys Cys Asn Pro Ala Cys Ala Gly Cys | (SEQ ID NO. ) |
| Cys Cys Asp Ile Cys Cys Asn Pro Ala Cys Ala Gly Cys | (SEQ ID NO. ) |
| Cys Cys Asp Lys Cys Cys Asn Pro Ala Cys Ala Gly Cys | (SEQ ID NO. ) |
| Cys Cys Asp Leu Cys Cys Asn Pro Ala Cys Ala Gly Cys | (SEQ ID NO. ) |
| Cys Cys Asp Met Cys Cys Asn Pro Ala Cys Ala Gly Cys | (SEQ ID NO. ) |
| Cys Cys Asp Asn Cys Cys Asn Pro Ala Cys Ala Gly Cys | (SEQ ID NO. ) |
| Cys Cys Asp Pro Cys Cys Asn Pro Ala Cys Ala Gly Cys | (SEQ ID NO. ) |
| Cys Cys Asp Gln Cys Cys Asn Pro Ala Cys Ala Gly Cys | (SEQ ID NO. ) |
| Cys Cys Asp Arg Cys Cys Asn Pro Ala Cys Ala Gly Cys | (SEQ ID NO. ) |
| Cys Cys Asp Ser Cys Cys Asn Pro Ala Cys Ala Gly Cys | (SEQ ID NO. ) |
| Cys Cys Asp Thr Cys Cys Asn Pro Ala Cys Ala Gly Cys | (SEQ ID NO. ) |
| Cys Cys Asp Trp Cys Cys Asn Pro Ala Cys Ala Gly Cys | (SEQ ID NO. ) |
| Cys Cys Asp Tyr Cys Cys Asn Pro Ala Cys Ala Gly Cys | (SEQ ID NO. ) |
| Cys Cys Glu Ile Cys Cys Asn Pro Ala Cys Phe Gly Cys | (SEQ ID NO. ) |
| Cys Cys Glu Ala Cys Cys Asn Pro Ala Cys Phe Gly Cys | (SEQ ID NO. ) |
| Cys Cys Glu Cys Cys Cys Asn Pro Ala Cys Phe Gly Cys | (SEQ ID NO. ) |
| Cys Cys Glu Asp Cys Cys Asn Pro Ala Cys Phe Gly Cys | (SEQ ID NO. ) |
| Cys Cys Glu Glu Cys Cys Asn Pro Ala Cys Phe Gly Cys | (SEQ ID NO. ) |
| Cys Cys Glu Phe Cys Cys Asn Pro Ala Cys Phe Gly Cys | (SEQ ID NO. ) |
| Cys Cys Glu Gly Cys Cys Asn Pro Ala Cys Phe Gly Cys | (SEQ ID NO. ) |
| Cys Cys Glu His Cys Cys Asn Pro Ala Cys Phe Gly Cys | (SEQ ID NO. ) |
| Cys Cys Glu Lys Cys Cys Asn Pro Ala Cys Phe Gly Cys | (SEQ ID NO. ) |
| Cys Cys Glu Leu Cys Cys Asn Pro Ala Cys Phe Gly Cys | (SEQ ID NO. ) |
| Cys Cys Glu Met Cys Cys Asn Pro Ala Cys Phe Gly Cys | (SEQ ID NO. ) |
| Cys Cys Glu Asn Cys Cys Asn Pro Ala Cys Phe Gly Cys | (SEQ ID NO. ) |
| Cys Cys Glu Pro Cys Cys Asn Pro Ala Cys Phe Gly Cys | (SEQ ID NO. ) |
| Cys Cys Glu Gln Cys Cys Asn Pro Ala Cys Phe Gly Cys | (SEQ ID NO. ) |
| Cys Cys Glu Arg Cys Cys Asn Pro Ala Cys Phe Gly Cys | (SEQ ID NO. ) |
| Cys Cys Glu Ser Cys Cys Asn Pro Ala Cys Phe Gly Cys | (SEQ ID NO. ) |
| Cys Cys Glu Thr Cys Cys Asn Pro Ala Cys Phe Gly Cys | (SEQ ID NO. ) |
| Cys Cys Glu Val Cys Cys Asn Pro Ala Cys Phe Gly Cys | (SEQ ID NO. ) |
| Cys Cys Glu Trp Cys Cys Asn Pro Ala Cys Phe Gly Cys | (SEQ ID NO. ) |
| Cys Cys Glu Tyr Cys Cys Asn Pro Ala Cys Phe Gly Cys | (SEQ ID NO. ) |
| Cys Cys Glu Leu Cys Cys Asn Pro Ala Cys Ala Pro Cys | (SEQ ID NO. ) |
| Cys Cys Glu Ala Cys Cys Asn Pro Ala Cys Ala Pro Cys | (SEQ ID NO. ) |
| Cys Cys Glu Cys Cys Cys Asn Pro Ala Cys Ala Pro Cys | (SEQ ID NO. ) |
| Cys Cys Glu Asp Cys Cys Asn Pro Ala Cys Ala Pro Cys | (SEQ ID NO. ) |
| Cys Cys Glu Glu Cys Cys Asn Pro Ala Cys Ala Pro Cys | (SEQ ID NO. ) |
| Cys Cys Glu Phe Cys Cys Asn Pro Ala Cys Ala Pro Cys | (SEQ ID NO. ) |
| Cys Cys Glu Gly Cys Cys Asn Pro Ala Cys Ala Pro Cys | (SEQ ID NO. ) |
| Cys Cys Glu His Cys Cys Asn Pro Ala Cys Ala Pro Cys | (SEQ ID NO. ) |
| Cys Cys Glu Ile Cys Cys Asn Pro Ala Cys Ala Pro Cys | (SEQ ID NO. ) |
| Cys Cys Glu Lys Cys Cys Asn Pro Ala Cys Ala Pro Cys | (SEQ ID NO. ) |
| Cys Cys Glu Met Cys Cys Asn Pro Ala Cys Ala Pro Cys | (SEQ ID NO. ) |
| Cys Cys Glu Asn Cys Cys Asn Pro Ala Cys Ala Pro Cys | (SEQ ID NO. ) |
| Cys Cys Glu Pro Cys Cys Asn Pro Ala Cys Ala Pro Cys | (SEQ ID NO. ) |
| Cys Cys Glu Gln Cys Cys Asn Pro Ala Cys Ala Pro Cys | (SEQ ID NO. ) |
| Cys Cys Glu Arg Cys Cys Asn Pro Ala Cys Ala Pro Cys | (SEQ ID NO. ) |
| Cys Cys Glu Ser Cys Cys Asn Pro Ala Cys Ala Pro Cys | (SEQ ID NO. ) |
| Cys Cys Glu Thr Cys Cys Asn Pro Ala Cys Ala Pro Cys | (SEQ ID NO. ) |
| Cys Cys Glu Val Cys Cys Asn Pro Ala Cys Ala Pro Cys | (SEQ ID NO. ) |
| Cys Cys Glu Trp Cys Cys Asn Pro Ala Cys Ala Pro Cys | (SEQ ID NO. ) |
| Cys Cys Glu Tyr Cys Cys Asn Pro Ala Cys Ala Pro Cys | (SEQ ID NO. ) |
| Cys Cys Glu Leu Cys Cys Asn Pro Ala Cys Phe Gly Cys | (SEQ ID NO. ) |
| Cys Cys Glu Ala Cys Cys Asn Pro Ala Cys Phe Gly Cys | (SEQ ID NO. ) |
| Cys Cys Glu Cys Cys Cys Asn Pro Ala Cys Phe Gly Cys | (SEQ ID NO. ) |
| Cys Cys Glu Asp Cys Cys Asn Pro Ala Cys Phe Gly Cys | (SEQ ID NO. ) |
| Cys Cys Glu Glu Cys Cys Asn Pro Ala Cys Phe Gly Cys | (SEQ ID NO. ) |
| Cys Cys Glu Phe Cys Cys Asn Pro Ala Cys Phe Gly Cys | (SEQ ID NO. ) |
| Cys Cys Glu Gly Cys Cys Asn Pro Ala Cys Phe Gly Cys | (SEQ ID NO. ) |
| Cys Cys Glu His Cys Cys Asn Pro Ala Cys Phe Gly Cys | (SEQ ID NO. ) |
| Cys Cys Glu Ile Cys Cys Asn Pro Ala Cys Phe Gly Cys | (SEQ ID NO. ) |
| Cys Cys Glu Lys Cys Cys Asn Pro Ala Cys Phe Gly Cys | (SEQ ID NO. ) |
| Cys Cys Glu Met Cys Cys Asn Pro Ala Cys Phe Gly Cys | (SEQ ID NO. ) |
| Cys Cys Glu Asn Cys Cys Asn Pro Ala Cys Phe Gly Cys | (SEQ ID NO. ) |
| Cys Cys Glu Pro Cys Cys Asn Pro Ala Cys Phe Gly Cys | (SEQ ID NO. ) |
| Cys Cys Glu Gln Cys Cys Asn Pro Ala Cys Phe Gly Cys | (SEQ ID NO. ) |
| Cys Cys Glu Arg Cys Cys Asn Pro Ala Cys Phe Gly Cys | (SEQ ID NO. ) |
| Cys Cys Glu Ser Cys Cys Asn Pro Ala Cys Phe Gly Cys | (SEQ ID NO. ) |
| Cys Cys Glu Thr Cys Cys Asn Pro Ala Cys Phe Gly Cys | (SEQ ID NO. ) |
| Cys Cys Glu Val Cys Cys Asn Pro Ala Cys Phe Gly Cys | (SEQ ID NO. ) |
| Cys Cys Glu Trp Cys Cys Asn Pro Ala Cys Phe Gly Cys | (SEQ ID NO. ) |
| Cys Cys Glu Tyr Cys Cys Asn Pro Ala Cys Phe Gly Cys | (SEQ ID NO. ) |
| Cys Cys Glu Val Cys Cys Asn Pro Ala Cys Ala Gly Cys | (SEQ ID NO. ) |
| Cys Cys Glu Ala Cys Cys Asn Pro Ala Cys Ala Gly Cys | (SEQ ID NO. ) |
| Cys Cys Glu Cys Cys Cys Asn Pro Ala Cys Ala Gly Cys | (SEQ ID NO. ) |
| Cys Cys Glu Asp Cys Cys Asn Pro Ala Cys Ala Gly Cys | (SEQ ID NO. ) |
| Cys Cys Glu Glu Cys Cys Asn Pro Ala Cys Ala Gly Cys | (SEQ ID NO. ) |
| Cys Cys Glu Phe Cys Cys Asn Pro Ala Cys Ala Gly Cys | (SEQ ID NO. ) |
| Cys Cys Glu Gly Cys Cys Asn Pro Ala Cys Ala Gly Cys | (SEQ ID NO. ) |
| Cys Cys Glu His Cys Cys Asn Pro Ala Cys Ala Gly Cys | (SEQ ID NO. ) |
| Cys Cys Glu Ile Cys Cys Asn Pro Ala Cys Ala Gly Cys | (SEQ ID NO. ) |
| Cys Cys Glu Lys Cys Cys Asn Pro Ala Cys Ala Gly Cys | (SEQ ID NO. ) |
| Cys Cys Glu Leu Cys Cys Asn Pro Ala Cys Ala Gly Cys | (SEQ ID NO. ) |
| Cys Cys Glu Met Cys Cys Asn Pro Ala Cys Ala Gly Cys | (SEQ ID NO. ) |
| Cys Cys Glu Asn Cys Cys Asn Pro Ala Cys Ala Gly Cys | (SEQ ID NO. ) |
| Cys Cys Glu Pro Cys Cys Asn Pro Ala Cys Ala Gly Cys | (SEQ ID NO. ) |
| Cys Cys Glu Gln Cys Cys Asn Pro Ala Cys Ala Gly Cys | (SEQ ID NO. ) |
| Cys Cys Glu Arg Cys Cys Asn Pro Ala Cys Ala Gly Cys | (SEQ ID NO. ) |
| Cys Cys Glu Ser Cys Cys Asn Pro Ala Cys Ala Gly Cys | (SEQ ID NO. ) |
| Cys Cys Glu Thr Cys Cys Asn Pro Ala Cys Ala Gly Cys | (SEQ ID NO. ) |
| Cys Cys Glu Trp Cys Cys Asn Pro Ala Cys Ala Gly Cys | (SEQ ID NO. ) |
| Cys Cys Glu Tyr Cys Cys Asn Pro Ala Cys Ala Gly Cys | (SEQ ID NO. ) |

[0242] Also useful are the following peptides wherein Xaa represents any of the 20 naturally occurring amino acids

Cys Cys Xaa Xaa Cys Cys Xaa Pro Ala Cys Xaa Gly
Cys
Cys Cys Ile Xaa Cys Cys Asn Pro Ala Cys Phe Gly
Cys
Cys Cys Asn Tyr Cys Cys Ser Pro Xaa Cys Xaa Gly
Cys

[0243] The invention also features deletion variants of any of the peptides described herein in which one, two, three or four amino acids (or non-natural amino acids or natural or non-natural amino acid analogs), other than a Cys (or an amino acid substituted for Cys, e.g., an amino acid capable of forming a covalent bond to another amino acid), are deleted. Where two (or more) amino acids are deleted and the peptide comprises the sequence: Cysₐ Cys_{b} Xaa Xaa Cys, Cys_{d} Xaa Xaa Xaa Cysₑ Xaa Xaa Cys_{f}, in some embodiments two or more deletions can be located between Cys_{b} and Cys, and/or between Cys_{d} and Cysₑ and/or between Cysₑ and Cys_{f}. However, in other embodiments there is at most one deletion between each of Cys_{b} and Cys, or between Cys_{d} and Cysₑ or between Cysₑ and Cys_{f}. Thus, the invention includes any of the peptides described herein comprising the sequence Cysₐ Cys_{b} Xaa Xaa Cys, Cys_{d} Xaa Xaa Xaa Cysₑ Xaa Xaa Cys_{f} wherein: a) one amino acid between Cys_{b} and Cys, is deleted; b) one amino acid between Cys_{d} and Cysₑ is deleted; c) one amino acid between Cysₑ and Cys_{f} is deleted; d) one amino acid between Cys_{b} and Cys_{c} is deleted and one amino acid between Cys_{d} and Cysₑ is deleted; e) one amino acid between Cys_{d} and Cysₑ is deleted and one amino acid between Cysₑ and Cys_{f} is deleted; f) one amino acid between Cys_{b} and Cys_{c} is deleted and one amino acid between Cysₑ and Cys_{f} is deleted or g) one amino acid between Cys_{b} and Cys_{C} is deleted, one amino acid between Cys_{d} and Cysₑ is deleted and one amino acid between Cysₑ and Cys_{f} is deleted. In certain embodiments, the various deletion variants are peptides that bind to and/or activate the GC-C receptor. In various embodiments, the various deletion variants are peptides that increase cGMP levels.

[0244] Deletion variants of Cys Cys Glu Tyr Cys Cys Asn Pro Ala Cys Thr Gly Cys Tyr (SEQ ID NO:3) include the peptides listed in FIG. 11. In these deletion variants, any of the amino acids can be deleted and there can be one, two, three or four amino acids deleted other than Cys.

[0245] The invention also features insertion variants of any of the peptides described herein in which one, two, three or four amino acids (e.g., Gly or Ala) are inserted before or after any amino acid in the peptide. In some embodiments no more than one amino acid is inserted between two Cys. For example, where two or more amino acids are inserted and the peptide comprises the sequence Cysₐ Cys_{b} Xaa Xaa Cys, Cys_{d} Xaa Xaa Xaa Cysₑ Xaa Xaa Cys_{f}, in some embodiments two or more insertions can be located between Cys_{b} and Cys_{c} or between Cys_{d} and Cysₑ or between Cysₑ and Cys_{f}. However, in other embodiments no more than one insertion is located between Cys_{b} and Cys_{c} or between Cys_{d} and Cysₑ or between Cysₑ and Cys_{f}. Thus, the invention features any of the peptides described herein comprising the sequence Cysₐ Cys_{b} Xaa Xaa Cys, Cys_{d} Xaa Xaa Xaa Cysₑ Xaa Xaa Cys_{f} wherein: a) one amino acid is inserted between Cys_{b} and Cys_{c}; b) one amino acid is inserted between Cys_{d} and Cysₑ; c) one amino acid is inserted between Cysₑ and Cys_{f}; d) one amino acid is inserted between Cys_{b} and Cys_{c} and one amino acid is inserted between Cys_{d} and Cysₑ; e) one amino acid is inserted between Cys_{d} and Cysₑ and one amino acid is inserted between Cysₑ and Cys_{f}; f) one amino acid is inserted between Cys_{b} and Cys_{c} and one amino acid is inserted between Cysₑ and Cys_{f}; or g) one amino acid is inserted between Cys_{b} and Cys_{c}, one amino acid is inserted between Cys_{d} and Cysₑ and one amino acid is inserted between Cysₑ and Cys_{f}. In addition, one or more amino acids can be inserted preceding Cysₐ and/or one or more amino acids can be inserted following Cys_{f}.

[0246] In various embodiments, the various insertion variants are peptides that bind to and/or activate the GC-C receptor. In various embodiments, the various insertion variants are peptides that increase cGMP levels.

[0247] Insertion variants of Cys Cys Glu Tyr Cys Cys Asn Pro Ala Cys Thr Gly Cys Tyr (SEQ ID NO:3) include those in which up to four amino acids (i.e., 0, 1, 2, 3 or 4) can be inserted after each amino acid. Thus, the invention includes peptides having the sequence: Cys Xaa₍₀₋₄₎ Cys Xaa₍₀₋₄₎ Glu Xaa₍₀₋₄₎ Tyr Xaa₍₀₋₄₎ Cys Xaa₍₀₋₄₎ Cys Xaa₍₀₋₄₎ Asn Xaa₍₀₋₄₎ Pro Xaa₍₀₋₄₎ Ala Xaa₍₀₋₄₎ Cys Xaa₍₀₋₄₎ Thr Xaa₍₀₋₄₎ Gly Xaa₍₀₋₄₎ Cys Xaa₍₀₋₄₎ Tyr Xaa₍₀₋₄₎₎ (SEQ ID NO:). The inserted amino acids can be any amino acid or amino acid analog (natural or non-natural) and can be the same or different. In certain embodiments the inserted amino acids are all Gly or all Ala or a combination of Gly and Ala.

[0248] FIG. 12 depicts insertion variants of the peptide having the sequence: Cys Cys Glu Tyr Cys Cys Asn Pro Ala Cys Thr Gly Cys Tyr (SEQ ID NO:3).

[0249] The invention also features variants of peptides having the sequence Xaa₁ Xaa₂ Xaa₃ Xaa₄ Xaa₅ Cys₆ Cys₇ Xaa₈ Xaa₉ Cys₁₀ Cys₁₁ Xaa₁₂ Xaa₁₃ Xaa₁₄ Cys₁₅ Xaa₁₆ Xaa₁₇ Cys₁₈ Xaa₁₉ Xaa₂₀ Xaa₂₁ (SEQ ID NO: 1), e.g., variants of Cys Cys Glu Tyr Cys Cys Asn Pro Ala Cys Thr Gly Cys Tyr (SEQ ID NO:3), in which up to four amino acids are deleted and/or up to four amino acids are inserted. The insertions and deletions can be between Cys₆ and Cys₁₈ in SEQ ID NO:1 or they can be amino terminal to Cys₆ and/or carboxy terminal to Cys₁₈ in SEQ ID NO:1.

[0250] The invention also features peptides which may include one or more of the peptide modifications, one or more non-natural amino acid or amino acid analogs, one or more of the disulfide bond alternatives or one more of the alternative peptide bonds described herein.

[0251] The peptides of the invention can be present with a counterion. Useful counterions include salts of: acetate, benzenesulfonate, benzoate, calcium edetate, camsylate, carbonate, citrate, edetate (EDTA), edisylate, embonate, esylate, fumarate, gluceptate, gluconate, glutamate, glycollylarsanilate, hexylresorcinate, iodide, bromide, chloride, hydroxynaphthoate, isethionate, lactate, lactobionate, estolate, maleate, malate, mandelate, mesylate, mucate, napsylate, nitrate, pantothenate, phosphate, salicylate, stearate, succinate, sulfate, tartarate, tartrate, hydrochlorate, theoclate, acetamidobenzoate, adipate, alginate, aminosalicylate, anhydromethylenecitrate, ascorbate, aspartate, camphorate, caprate, caproate, caprylate, cinnamate, cyclamate, dichloroacetate, formate, gentisate, glucuronate, glycerophosphate, glycolate, hippurate, fluoride, malonate, napadisylate, nicotinate, oleate, orotate, oxalate, oxoglutarate, palmitate, pectinate, pectinate polymer, phenylethylbarbiturate, picrate, propionate, pidolate, sebacate, rhodanide, tosylate, and tannate.

[0252] The peptides and agonist of the intestinal guanylate cyclase (GC-C) receptor can be used to treat constipation or decreased intestinal motility, slow digestion or slow stomach emptying. The peptides can be used to relieve one or more symptoms of IBS (bloating, pain, constipation), GERD (acid reflux into the esophagus), duodenogastric reflux, functional dyspepsia, or gastroparesis (nausea, vomiting, bloating, delayed gastric emptying) and other disorders described herein.

[0253] Also described herein is a purified polypeptide comprising (consisting essentially of or consisting of) the amino acid sequence:

X₁ Cys Glu X₂ X₃ X₄ Asn Pro Ala Cys Thr Gly X₅ X₆

wherein:
X₁, X₃, X₄ and X₅ are independently selected from: Ala, Arg, Asn, Asp, Cys, Gln, Glu, Gly, His, Ile, Leu, Lys, Met, Phe, Pro, Ser, Thr, Trp, Tyr and Val;
X₂ is selected from: Ala, Arg, Asn, Asp, Cys, Gln, Glu, Gly, His, Ile, Leu, Lys, Met, Phe, Pro, Ser, Thr, Trp, Tyr and Val; and
X₆ is selected from Phe, Trp and Tyr or is missing,
provided that when both X₁ and X₄ are Ala and both X₃ and X₅ are Cys or when both X₃ and X₅ are Ala and both X₁ and X₄ are Cys or when X₁, X₃, X₄ and X₅ are all Cys, then either X₆ is selected from Phe and Trp or X₂ is not Leu.

[0254] In various embodiments of X₁ Cys Glu X₂ X₃ X₄ Asn Pro Ala Cys Thr Gly X₅ X₆: at least one of X₁, X₃, X₄ and X₅ is Cys; at least two of X₁, X₃, X₄ and X₅ are Cys; at least three of X₁, X₃, X₄ and X₅ is Cys; X₁, X₃, X₄ and X₅ are Cys; X₁ and X₄ are Cys; X₃ and X₅ are Gly or Ala; X₃ and X₅ are Cys; X₁ and X₄ are Gly or Ala; X₁, X₃, X₄ and X₅ are Cys; X₂ is selected from: Ala, Arg, Asn, Asp, Cys, Gln, Glu, Gly, His, Ile, Lys, Met, Phe, Pro, Ser, Thr, Val, Trp and Tyr; one of X₁, X₃, X₄ and X₅ is Gly or Ala and the rest are Cys; two of X₁, X₃, X₄ and X₅ are Gly or Ala and the rest are Cys; three of X₁, X₃, X₄ and X₅ are Gly or Ala and the rest are Cys; X₁ and X₄ are independently Gly or Ala and X₃ and X₅ are Cys; X₃ and X₅ are independent Gly or Ala and X₁ and X₄ are Cys; X₂ is Phe, Tyr or Trp; X₂ is Phe; X₂ is Tyr; X₂ is Trp; X₆ is Tyr; X₆ is missing; X₁ is Gly or Ala; X₃ is Gly or Ala; X₄ is Gly or Ala; X₅ is Gly or Ala; X₁ and X₄ are Ala and X₃ and X₅ are Cys; X₃ and X₅ are Ala and X₁ and X₄ are Cys; X₁ and X₄ are Gly and X₃ and X₅ are Cys; X₃ and X₅ are Gly and X₁ and X₄ are Cys; one of X₁ and X₄ is Ala and the other is Gly and X₃ and X₅ are Cys; an one X₃ and X₅ is Ala and the other is Gly and X₁ and X₄ are Cys; the polypeptide comprises 100 or fewer amino acids; the polypeptide comprises 20 or fewer amino acids; the polypeptide comprises 15 or fewer amino acids. Additional embodiments are shown in FIG. 18.

[0255] The variants of the forgoing polypeptides can be created by insertion or deletion of amino acids. For example, one or two amino acids within the sequence X₁ Cys Glu X₂ X₃ X₄ Asn Pro Ala Cys Thr Gly X₅ X₆ can be deleted. The deleted amino acids can be selected from Glu, X₂, Asn, Pro, Ala, Thr and Gly in the sequence X₁ Cys Glu X₂ X₃ X₄ Asn Pro Ala Cys Thr Gly X₅ X₆. In addition, insertions of 1, 2, 3, or 4 contiguous amino acids into a peptide having the sequence X₁ Cys Glu X₂ X₃ X₄ Asn Pro Ala Cys Thr Gly X₅ X₆ can be made. Preferably the insertions are not between X₁ and Cys or between X₅ X₆ in a peptide having the sequence X₁ Cys Glu X₂ X₃ X₄ Asn Pro Ala Cys Thr Gly X₅ X₆. Various insertion and deletion variants are depicted in FIGS. 19 and 20 (Xaa represents any amino acid, e.g., any of the amino acids listed in Table 2.

[0256] GC-C agonists of the invention can also comprise, consist essentially of, or consist of peptides derived from the C-terminal domain of any of the peptides described herein. Thus, they can contain, for example, anywhere from 13-75 amino acids including 13, 14, 15, 16, 17, 18, 19, 20, 21, 22, 23, 24, 25, 26, 27, 28, 29, 30, 31, 32, 33, 34, 35, 36, 37, 38, 39, 40, 41, 42, 43, 44, 45, 46, 47, 48, 49, 50, 51, 52, 53, 54, 55, 56, 57, 58, 59, 60, 61, 62, 63, 64, 65, 66, 67, 68, 69, 70, 71, 72, 73, 74, and/or 75 amino acids of the C-terminal domain of any of the peptides described herein.

[0257] Also described are therapeutic methods employing any of the forgoing polypeptides (both with and without the proviso. The therapeutic methods include treating a disorder selected from the group consisting of: a gastrointestinal disorder, cystic fibrosis, congestive heart failure, benign prostatic hyperplasia, the method comprising administering a composition comprising any of the forgoing polypeptides (both with and without the proviso). The disorders that can be treated include: a gastrointestinal motility disorder, irritable bowel syndrome, chronic constipation, a functional gastrointestinal disorder, gastroesophageal reflux disease, functional heartburn, dyspepsia, functional dyspepsia, nonulcer dyspepsia, gastroparesis, chronic intestinal pseudo-obstruction, colonic pseudo-obstruction, Crohn's disease, ulcerative colitis, and inflammatory bowel disease as well as other diseases and disorders described herein.

[0258] Also described are methods for producing any of the forgoing polypeptides comprising providing a cell harboring a nucleic acid molecule encoding the polypeptide, culturing the cell under conditions in which the peptide is expressed, and isolating the expressed peptide.

[0259] Also described are methods for producing any of the forgoing polypeptides comprising chemically synthesizing the peptide and then purifying the synthesized peptide.

[0260] Also described are pharmaceutical compositions comprising the forgoing polypeptides.

[0261] Also described are nucleic acid molecules encoding any of the forgoing polypeptides, vectors (e.g., expression vectors) containing such nucleic acid molecules and host cells harboring the nucleic acid molecules or vectors. Certain of the polypeptides described herein have some homology to bacterial ST polypeptides, e.g., E. coli. ST polypeptide. Bacterial ST polypeptides are commonly expressed as an immature prepropolypeptide that is processed to yield the mature polypeptide. Thus, immature ST peptides generally include a so-called “pre sequence” followed by a “pro sequence” and then the mature polypeptide sequence. Many other immature polypeptides include a pre sequence and/or a pro sequence. These pre sequences and/or pro sequences are often important for the efficient proper folding of the mature polypeptide. In addition, such sequences can protect the mature polypeptide from premature degradation in the body or stabilize a particular isomer of the polypeptide. Furthermore, such sequences can function as signal sequences to help translocate the polypeptide across bacterial cellular membranes. In some cases, such sequences may influence oligomerization. Accordingly, in some embodiments the polypeptides described herein are produced and or administered in a form that includes a pro sequence, a pre sequence or both a pre sequence and a pro sequence (a “prepro sequence”) at their amino terminus. Thus, useful polypeptides can include a pre sequence, a pro sequence or a prepro sequence preceding (amino-terminal to) a GC-C receptor agonist polypeptide described herein. FIG. 21 depicts the pre sequence (SEQ ID NOs:______-______), pro sequence (SEQ ID NOs:______-______), prepro sequence (SEQ ID NOs:______-______), and mature sequence for a number of bacterial ST polypeptides. The mature sequence is composed of an active core sequence (SEQ ID NOs:______-______), an N-terminal non-core sequence (SEQ ID NOs:______-______), and a C-terminal non-core sequence (SEQ ID NOs:______-______). The active core sequence is sufficient for GC-C receptor binding activity in many cases. Nevertheless it can be desirable to include an N-terminal non-core sequence (SEQ ID NOs:______-______), and/or a C-terminal non-core sequence in an active polypeptide. One or more of a pre sequence, a pro sequence, prepro sequence, and an N-terminal non-core sequence can be present at the amino terminus of a GC-C receptor agonist polypeptide described herein. In addition, a C-terminal non-core sequence can be included at the carboxy terminus of a GC-C receptor agonist polypeptide. Thus, described herein are polypeptides comprising, consisting of or consisting essentially of (from amino terminus to carboxy terminus) one or more of: a pre sequence (SEQ ID NOs:______-______; pre sequences) a pro sequence (SEQ ID NOs:______-______; pro sequences); an N-terminal non-core sequence (SEQ ID NOs:______-______; N-terminal core sequences) followed by a GC-C receptor agonist polypeptide described herein, e.g., Cys Cys Glu Tyr Cys Cys Asn Pro Ala Cys Thr Gly Cys Tyr (SEQ ID NO:3), optionally followed by a C-terminal non-core sequence (SEQ ID NOs:______-______; N-terminal non-core sequences). Among the useful GC-C receptor polypeptides that can modified by the addition of pre, pro, prepro, N-terminal non-core, and C-terminal non-core sequences are:

| | |
|---|---|
| Cys Cys Glu Ala Cys Cys Asn Pro Ala Cys Thr Gly Cys | (SEQ ID NO: ) |
| Cys Cys Glu Arg Cys Cys Asn Pro Ala Cys Thr Gly Cys | (SEQ ID NO: ) |
| Cys Cys Glu Asn Cys Cys Asn Pro Ala Cys Thr Gly Cys | (SEQ ID NO: ) |
| Cys Cys Glu Asp Cys Cys Asn Pro Ala Cys Thr Gly Cys | (SEQ ID NO: ) |
| Cys Cys Glu Cys Cys Cys Asn Pro Ala Cys Thr Gly Cys | (SEQ ID NO: ) |
| Cys Cys Glu Gln Cys Cys Asn Pro Ala Cys Thr Gly Cys | (SEQ ID NO: ) |
| Cys Cys Glu Glu Cys Cys Asn Pro Ala Cys Thr Gly Cys | (SEQ ID NO: ) |
| Cys Cys Glu Gly Cys Cys Asn Pro Ala Cys Thr Gly Cys | (SEQ ID NO: ) |
| Cys Cys Glu His Cys Cys Asn Pro Ala Cys Thr Gly Cys | (SEQ ID NO: ) |
| Cys Cys Glu Ile Cys Cys Asn Pro Ala Cys Thr Gly Cys | (SEQ ID NO: ) |
| Cys Cys Glu Lys Cys Cys Asn Pro Ala Cys Thr Gly Cys | (SEQ ID NO: ) |
| Cys Cys Glu Met Cys Cys Asn Pro Ala Cys Thr Gly Cys | (SEQ ID NO: ) |
| Cys Cys Glu Phe Cys Cys Asn Pro Ala Cys Thr Gly Cys | (SEQ ID NO: ) |
| Cys Cys Glu Pro Cys Cys Asn Pro Ala Cys Thr Gly Cys | (SEQ ID NO: ) |
| Cys Cys Glu Ser Cys Cys Asn Pro Ala Cys Thr Gly Cys | (SEQ ID NO: ) |
| Cys Cys Glu Thr Cys Cys Asn Pro Ala Cys Thr Gly Cys | (SEQ ID NO: ) |
| Cys Cys Glu Trp Cys Cys Asn Pro Ala Cys Thr Gly Cys | (SEQ ID NO: ) |
| Cys Cys Glu Val Cys Cys Asn Pro Ala Cys Thr Gly Cys | (SEQ ID NO: ) |
| Cys Cys Glu Tyr Cys Cys Asn Pro Ala Cys Thr Gly Cys | (SEQ ID NO: ) |
| Cys Cys Glu Leu Cys Cys Asn Pro Ala Cys Thr Gly Cys | (SEQ ID NO: ) |
| Cys Cys Glu Ala Cys Cys Asn Pro Ala Cys Thr Gly Cys Tyr | (SEQ ID NO: ) |
| Cys Cys Glu Arg Cys Cys Asn Pro Ala Cys Thr Gly Cys Tyr | (SEQ ID NO: ) |
| Cys Cys Glu Asn Cys Cys Asn Pro Ala Cys Thr Gly Cys Tyr | (SEQ ID NO: ) |
| Cys Cys Glu Asp Cys Cys Asn Pro Ala Cys Thr Gly Cys Tyr | (SEQ ID NO: ) |
| Cys Cys Glu Cys Cys Cys Asn Pro Ala Cys Thr Gly Cys Tyr | (SEQ ID NO: ) |
| Cys Cys Glu Gln Cys Cys Asn Pro Ala Cys Thr Gly Cys Tyr | (SEQ ID NO: ) |
| Cys Cys Glu Glu Cys Cys Asn Pro Ala Cys Thr Gly Cys Tyr | (SEQ ID NO: ) |
| Cys Cys Glu Gly Cys Cys Asn Pro Ala Cys Thr Gly Cys Tyr | (SEQ ID NO: ) |
| Cys Cys Glu His Cys Cys Asn Pro Ala Cys Thr Gly Cys Tyr | (SEQ ID NO: ) |
| Cys Cys Glu Ile Cys Cys Asn Pro Ala Cys Thr Gly Cys Tyr | (SEQ ID NO: ) |
| Cys Cys Glu Lys Cys Cys Asn Pro Ala Cys Thr Gly Cys Tyr | (SEQ ID NO: ) |
| Cys Cys Glu Met Cys Cys Asn Pro Ala Cys Thr Gly Cys Tyr | (SEQ ID NO: ) |
| Cys Cys Glu Phe Cys Cys Asn Pro Ala Cys Thr Gly Cys Tyr | (SEQ ID NO: ) |
| Cys Cys Glu Pro Cys Cys Asn Pro Ala Cys Thr Gly Cys Tyr | (SEQ ID NO: ) |
| Cys Cys Glu Ser Cys Cys Asn Pro Ala Cys Thr Gly Cys Tyr | (SEQ ID NO: ) |
| Cys Cys Glu Thr Cys Cys Asn Pro Ala Cys Thr Gly Cys Tyr | (SEQ ID NO: ) |
| Cys Cys Glu Trp Cys Cys Asn Pro Ala Cys Thr Gly Cys Tyr | (SEQ ID NO: ) |
| Cys Cys Glu Val Cys Cys Asn Pro Ala Cys Thr Gly Cys Tyr | (SEQ ID NO: ) |
| Cys Cys Glu Tyr Cys Cys Asn Pro Ala Cys Thr Gly Cys Tyr | (SEQ ID NO: 3) |
| Cys Cys Glu Leu Cys Cys Asn Pro Ala Cys Thr Gly Cys Tyr | (SEQ ID NO: ) |

[0262] In some cases it may be desirable to have a polypeptide that includes a pre sequence from a first bacterial ST polypeptide and a pro sequence from a second bacterial ST polypeptide. In other cases, the pre sequence and the pro sequence are from the same ST polypeptide.

[0263] Useful polypeptides can include a naturally-occurring bacterial ST polypeptide in its mature form, as a prepro polypeptide (includes, from amino terminus to carboxy terminus, pre sequence, pro sequence and mature polypeptide), as a propolypeptide (includes, from amino terminus to carboxy terminus, pro sequence and mature polypeptide) or as a prepolypeptide (includes, from amino terminus to carboxy terminus, pre sequence and mature polypeptide). FIG. 21 depicts these various bacterial ST polypeptides.

[0264] In some cases a polypeptide will be produced, e.g., recombinantly, with a pre sequence, a pro sequence, an N-terminal non-core sequence and/or a C-terminal non-core sequence. In certain cases the one or more of the pre sequence, pro sequence, N-terminal non-core sequence and/or C-terminal non-core sequence is removed prior to administering the polypeptide to a patient. In certain cases only pre sequence and/or pro sequence is removed prior to administration of the polypeptide to a patient. In other cases the prepropolypeptide, propolypeptide or the prepolypeptide is administered to the patient. The pre sequence and/or the pro sequence may stabilize the polypeptide or an active isomer thereof, facilitate efficient folding of the polypeptide or protect the polypeptide from degradation in the patient's body. Thus, pre sequences, pro sequences and/or preprosequences that do not significantly interfere with GC-C receptor agonist activity can be beneficial.

[0265] In some cases useful polypeptides will include only a portion (e.g., 20, 15, 12, 11, 10, 9, 8, 6, 5, 4 or fewer) of the amino acids of a pre sequence (SEQ ID NOs:______-______), pro sequence (SEQ ID NOs:______-______), prepro sequence (SEQ ID NOs:______-______), N-terminal non-core sequence (SEQ ID NOs:______-______), or C-terminal non-core sequence (SEQ ID NOs:______-______).

### Metabolites of Asparagine

[0266] In some cases an asparagine (Asn) of a polypeptide described herein can be metabolized to have a different structure and the GC receptor agonist containing such a metabolite of Asn may retain activity. Polypeptides where one or more Asn, e.g., one or more Asn of an embodiment of SEQ ID NO:1 described herein are replaced by a metabolite of Asn can be useful in the methods described herein and can be present in a pharmaceutical composition that optionally contains one or more additional active ingredients.

[0267] For example, one or more Asn of a polypeptide and the peptide bond carboxy terminal thereto having the structure:

[chemical structure]

can replaced by a group having a structure selected from:

[chemical structure]

[0268] Thus, the Asn and the peptide bond carboxy terminal there to can be replaced by a cyclic imide:

[chemical structure]

[0269] Asp:

[chemical structure]

[0270] The Asp can be L-Asp or D-Asp. The isoAsn can be D-isoAsn or L-isoAsn.

[0271] Considering the asparagine only, one or more Asn having the structure:

[chemical structure]

[0272] can be optionally replaced by a group having a structure selected from (a), (b) and (c):

[chemical structure]

provided that an Asn at the carboxy terminus is not replaced by structure (a) or structure (c). When the Asn is at the carboxy terminus of the peptide, structure (a) cannot form. Since structure (c) is formed through structure (a), structure (c) cannot be formed when the Asn is at the carboxy terminus.

[0273] The formation of the various metabolites of Asp is depicted below.

[chemical structure]

[0274] The details of one or more embodiments of the invention are set forth in the accompanying description. All of the publications, patents and patent applications are hereby incorporated by reference.

### FIGURES

[0275] FIG. 1a depicts the results of LCMS analysis of recombinant SEQ ID NO:4 peptide and SEQ ID NO:5 peptide.

[0276] FIGS. 1b and 1c depict the results of LCMS analysis of synthetic SEQ ID NO:3 peptide and the blank.

[0277] FIGS. 2a and b depict the results of the intestinal GC-C receptor activity assay of synthetic SEQ ID NO:4 peptide, SEQ ID NO:5 peptide, two different SEQ ID NO:3 peptides and SEQ ID NO:6 peptide.

[0278] FIG. 3a depicts the effect of recombinant SEQ ID NO:4 peptide and Zelnorm® in an acute murine gastrointestinal transit model.

[0279] FIG. 3b depicts the effect of synthetic SEQ ID NO:3 peptide and Zelnorm® in an acute murine gastrointestinal transit model.

[0280] FIGS. 4a and 4b depict the effect of peptides SEQ ID NO:5, SEQ ID NO:3, and SEQ ID NO:4 in an acute murine gastrointestinal transit model.

[0281] FIG. 4c depicts the effect of SEQ ID NO:3 peptide in a chronic murine gastrointestinal transit model.

[0282] FIGS. 4d and 4e depict the effect of Zelnorm®, and peptides SEQ ID NO:3, SEQ ID NO:6 in an acute rat gastrointestinal transit model.

[0283] FIG. 4f depicts the effect of SEQ ID NO:3 peptide on a gastrointestinal transit model in wild-type mice and mice lacking the guanylate cyclase C receptor.

[0284] FIG. 5a depicts the effect of SEQ ID NO:4 peptide and Zelnorm® in a suckling mouse intestinal secretion model.

[0285] FIG. 5b depicts the effects of SEQ ID NO:3 and Zelnorm® in a mouse intestinal secretion model.

[0286] FIGS. 6a, 6b, and 6c depict the effects of SEQ ID NO:4, SEQ ID NO:3, SEQ ID NO:5 and SEQ ID NO:6 peptides in a mouse intestinal secretion model.

[0287] FIGS. 7a and 7b show the results of experiments in which SEQ ID NO:3 activity was analyzed in either the TNBS colonic distension model or the PRS colonic distension model.

[0288] FIGS. 7c and 7d show the results of colonic distension experiments in wild-type and GC-C KO mice under basal and TNBS-inducing conditions in the presence and absence of SEQ ID NO:3.

[0289] FIGS. 7e and 7f show the results of baseline and water avoidance stress induced visceral nociception in the presence and absence of SEQ ID NO:3.

[0290] FIGS. 8a and 8b show the effects of differing doses of SEQ ID NO:5 and SEQ ID NO:3 in the PBQ writhing assay.

[0291] FIG. 9a shows the results of Kd determination analysis using SEQ ID NO:3 in a competitive radioligand binding assay.

[0292] FIG. 9b shows the results of SEQ ID NO:3 binding experiments in wild-type and GC-C KO mice.

[0293] FIGS. 10a and 10b show bioavailability data for IV and orally administered SEQ ID NO:3 as detected by an ELISA assay and LCMS.

[0294] FIG. 11 depicts deletion variants of a peptide having the sequence of SEQ ID NO:3.

[0295] FIG. 12 depicts insertion variants of a peptide having the sequence of SEQ ID NO:3.

[0296] FIG. 13a depicts the carboxypeptidase A digestion of a Z-Gly-Gly-Leu control peptide.

[0297] FIG. 13b depicts the carboxypeptidase digestion of SEQ ID NO:3.

[0298] FIG. 13c depicts the total ion current chromotography of carboxypeptidase A digested samples.

[0299] FIG. 13d depicts the spectrum view of the 3.3 min peak of T240 sample of SEQ ID NO:3.

[0300] FIG. 13e depicts the rate of formation of SEQ ID NO:3 product in the presence of Carboxypeptidase A.

[0301] FIG. 13f depicts the disappearance of SEQ ID NO:3 and the formation of SEQ ID NO:6.

[0302] FIG. 14a is an explanation of The Bristol Stool Form Scale (BSFS).

[0303] FIG. 14b shows the stool consistency scored by the subjects using the Bristol Stool Form Scale after a single dose of SEQ ID NO:3.

[0304] FIG. 14c shows the percent of subjects with at least a 2-point increase in BSFS consistency score (mean pre-dose compared to peak post-dose) after a single dose of SEQ ID NO:3.

[0305] FIG. 15a shows The Bristol Stool Form Scale scores for the different dosing groups of SEQ ID NO:3 the seven days prior to and the seven days during dosing.

[0306] FIG. 15b shows the Mean Stool Frequency (stools per week) for the subjects over 7 days treatment with varying doses of SEQ ID NO:3 or placebo.

[0307] FIG. 15c shows the Mean Stool Weight (g) over 7 days treatment with varying doses of SEQ ID NO:3 or placebo.

[0308] FIG. 15d presents the Mean Ease of Passage Scale.

[0309] FIG. 15e shows the Mean Ease of Passage Scores for subjects treated over 7 days treatment with varying doses of SEQ ID NO: 3 or placebo.

[0310] FIG. 16 shows the effects of SEQ ID NO:3 in an in vivo model of post operative ileus.

[0311] FIGS. 17a and 17b show the effects of SEQ ID NO:3 on cGMP activity and secretion in rodent ligated loop experiments.

[0312] FIGS. 18-20 depict variants of SEQ ID NO:3.

[0313] FIG. 21 is a table depicting various subsequences of ST polypeptides.

### DETAILED DESCRIPTION

[0314] The peptides of the invention bind to the intestinal guanylate cyclase (GC-C) receptor, a key regulator of fluid and electrolyte balance in the intestine. When stimulated, this receptor, which is located on the apical membrane of the intestinal epithelial surface, causes an increase in intestinal epithelial cyclic GMP (cGMP). This increase in cGMP is believed to cause a decrease in water and sodium absorption and an increase in chloride and potassium ion secretion, leading to changes in intestinal fluid and electrolyte transport and increased intestinal motility. The intestinal GC-C receptor possesses an extracellular ligand binding region, a transmembrane region, an intracellular protein kinase-like region and a cyclase catalytic domain. Proposed functions for the GC-C receptor are fluid and electrolyte homeostasis, the regulation of epithelial cell proliferation and the induction of apoptosis (Shalubhai 2002 Curr Opin Drug Dis Devel 5:261-268).

[0315] In addition to being expressed in the intestine by gastrointestinal epithelial cells, GC-C is expressed in extra-intestinal tissues including kidney, lung, pancreas, pituitary, adrenal, developing liver and gall bladder (reviewed in Vaandrager 2002 Mol Cell Biochem 230:73-83, Kulaksiz et al. 2004, Gastroenterology 126:732-740) and male and female reproductive tissues (reviewed in Vaandrager 2002 Mol Cell Biochem 230:73-83). This suggests that the GC-C receptor agonists can be used in the treatment of disorders outside the GI tract, for example, congestive heart failure and benign prostatic hyperplasia.

[0316] Ghrelin, a peptide hormone secreted by the stomach, is a key regulator of appetite in humans. Ghrelin expression levels are regulated by fasting and by gastric emptying (Kim et al. 2003 Neuroreprt 14:1317-20; Gualillo et al. 2003 FEBS Letts 552: 105-9). Thus, by increasing gastrointestinal motility, GC-C receptor agonists may also be used to regulate obesity.

[0317] In humans, the GC-C receptor is activated by guanylin (Gn) (U.S. Pat. No. 5,96,097), uroguanylin (Ugn) (U.S. Pat. No. 5,140,102) and lymphoguanylin (Forte et al. 1999 Endocrinology 140:1800-1806). Interestingly, these agents are 10-100 fold less potent than a class of bacterially derived peptides, termed ST (reviewed in Gianella 1995 J Lab Clin Med 125:173-181). ST peptides are considered super agonists of GC-C and are very resistant to proteolytic degradation.

[0318] ST peptide is capable of stimulating the enteric nervous system (Rolfe et al., 1994, J Physiolo 475: 531-537; Rolfe et al. 1999 Gut 44: 615-619; Nzegwu et al. 1996 Exp Physiol 81: 313-315). Also, cGMP has been reported to have antinociceptive effects in multiple animal models of pain (Lazaro Ibanez et al. 2001 Eur J Pharmacol 426: 39-44; Soares et al. 2001 British J Pharmacol 134: 127-131; Jain et al. 2001 Brain Res 909:170-178; Amarante et al. 2002 Eur J Pharmacol 454:19-23). Thus, GC-C agonists may have both an analgesic as well an anti-inflammatory effect.

[0319] In bacteria, ST peptides are derived from a preproprotein that generally has at least 70 amino acids. The pre and pro regions are cleaved as part of the secretion process, and the resulting mature protein, which generally includes fewer than 20 amino acids, is biologically active.

[0320] Among the known bacterial ST peptides are: E. coli ST Ib (Moseley et al. 1983 Infect. Immun. 39:1167) having the mature amino acid sequence Asn Ser Ser Asn Tyr Cys Cys Glu Leu Cys Cys Asn Pro Ala Cys Thr Gly Cys Tyr (SEQ ID NO:______); E. coli ST Ia (So and McCarthy 1980 Proc. Natl. Acad. Sci. USA 77:4011) having the mature amino acid sequence Asn Thr Phe Tyr Cys Cys Glu Leu Cys Cys Asn Pro Ala Cys Ala Gly Cys Tyr (SEQ ID NO:7). E. coli ST I* (Chan and Giannella 1981 J. Biol. Chem. 256:7744) having the mature amino acid sequence Asn Thr Phe Tyr Cys Cys Glu Leu Cys Cys Tyr Pro Ala Cys Ala Gly Cys Asn (SEQ ID NO:______); C. freundii ST peptide (Guarino et al. 1989b Infect. Immun. 57:649) having the mature amino acid sequence Asn Thr Phe Tyr Cys Cys Glu Leu Cys Cys Asn Pro Ala Cys Ala Gly Cys Tyr (SEQ ID NO:______); Y. enterocolitica ST peptides, Y-ST(Y-STa), Y-STb, and Y-STc (reviewed in Huang et al. 1997 Microb. Pathog. 22:89) having the following pro-form amino acid sequences: Gln Ala Cys Asp Pro Pro Ser Pro Pro Ala Glu Val Ser Ser Asp Trp Asp Cys Cys Asp Val Cys Cys Asn Pro Ala Cys Ala Gly Cys (SEQ ID NO:______) (as well as a Ser-7 to Leu-7 variant of Y-STa (SEQ ID NO:______), (Takao et al. 1985 Eur. J. Biochem. 152:199)); Lys Ala Cys Asp Thr Gln Thr Pro Ser Pro Ser Glu Glu Asn Asp Asp Trp Cys Cys Glu Val Cys Cys Asn Pro Ala Cys Ala Gly Cys (SEQ ID NO:); Gln Glu Thr Ala Ser Gly Gln Val Gly Asp Val Ser Ser Ser Thr Ile Ala Thr Glu Val Ser Glu Ala Glu Cys Gly Thr Gln Ser Ala Thr Thr Gln Gly Glu Asn Asp Trp Asp Trp Cys Cys Glu Leu Cys Cys Asn Pro Ala Cys Phe Gly Cys (SEQ ID NO:______), respectively; Y. kristensenii ST peptide having the mature amino acid sequence Ser Asp Trp Cys Cys Glu Val Cys Cys Asn Pro Ala Cys Ala Gly Cys (SEQ ID NO:______); V. cholerae non-01 ST peptide (Takao et al. (1985) FEBS lett. 193:250) having the mature amino acid sequence Ile Asp Cys Cys Glu Ile Cys Cys Asn Pro Ala Cys Phe Gly Cys Leu Asn (SEQ ID NO:______); and V. mimicus ST peptide (Arita et al. 1991 FEMS Microbiol. Lett. 79:105) having the mature amino acid sequence Ile Asp Cys Cys Glu Ile Cys Cys Asn Pro Ala Cys Phe Gly Cys Leu Asn (SEQ ID NO:______). Table I below provides sequences of all or a portion of a number of mature ST peptides and analogs thereof. Such peptides and peptides comprising these peptides are useful GCC agonists.

TABLE I

| GenBank ® | | |
|---|---|---|
| Accession | GenBank ® | |
| No. | GI No. | Sequence |
| QHECIB | 69638 | NSSNYCCELCCNPACTGCY(SEQ ID |
| | | NO: _) |
| P01559 | 123711 | NTFYCCELCCNPACAGCY(SEQ ID |
| | | NO: _) |
| AAA24653 | 147878 | NTFYCCELCCNPACAPCY(SEQ ID |
| | | NO: _) |
| P01560 | 123707 | NTFYCCELCCYPACAGCN(SEQ ID |
| | | NO: _) |
| AAA27561 | 295439 | IDCCEICCNPACFGCLN(SEQ ID NO: _) |
| P04429 | 123712 | IDCCEICCNPACFGCLN(SEQ ID NO: _) |
| S34671 | 421286 | IDCCEICCNPACF(SEQ ID NO: _) |
| CAA52209 | 395161 | IDCCEICCNPACFG(SEQ ID NO: _) |
| A54534 | 628844 | IDCCEICCNPACFGCLN(SEQ ID NO: _) |
| AAL02159 | 15592919 | IDRCEICCNPACFGCLN(SEQ ID NO: _) |
| AAA18472 | 487395 | DWDCCDVCCNPACAGC(SEQ ID NO: _) |
| S25659 | 282047 | DWDCCDVCCNPACAGC(SEQ ID NO: _) |
| P74977 | 3913874 | NDDWCCEVCCNPACAGC(SEQ ID NO: _) |
| BAA23656 | 2662339 | WDWCCELCCNPACFGC(SEQ ID NO: _) |
| P31518 | 399947 | SDWCCEVCCNPACAGC(SEQ ID NO: _) |
| | | QACDPPSPPAEVSSDWDCCDVCCDPAC AGC |
| | | QACDPPSPPAEVSSDWDCCDVCCNPACAG C |
| | | KACDTQTPSPSEENDDTCCEVCCNPACAG C |
| | | QETASGQVGDVSSSTIATEVSEAECGTQSA |
| | | TTQGENDWDWCCELCCNPACFGC |
| | | MKKLMLAIFISVLSFPSFSQSTESLDS |
| | | SKEKITLETKKCDVVKNNSEKKSEN |
| | | MNNTFYCCELCCNPACAGCY |
| | | MKKSILFIFLSVLSFSPFAQDAKPVES |
| | | SKEKITLESKKCNIAKKSNKSGPESM |
| | | NSSNYCCELCCNPACTGCY |
| | | MKKIVFVLVLMLSSFGAFGQETVSG |
| | | QFSDALSTPITAEVYKQACDPPLPPA |
| | | EVSSDWDCCDVCCNPACAGC |
| | | GNLIDCCEICCNPACFGCLN |
| | | GNLIDRCEICCNPACFGCLN |
| | | PPAEVSSDWDCCDVCCNPACAGC |
| | | NYCCELCCNPACTGCF |

[0321] The immature (including pre and pro regions) form of E. coli ST-1A (ST-P) protein has the sequence: mkklmlaifisvlsfpsfsqstesldsskekitletkkcdvvknnsekksenmnntfyccelccnpacagcy (SEQ ID NO:______; see GenBank Accession No. P01559 (gi:123711). The pre sequence extends from aa 1-19. The pro sequence extends from aa 20-54. The mature protein extends from 55-72. The immature (including pre and pro regions) form of E. coli ST-1B (ST-H) protein has the sequence: mkksilfiflsvlsfspfaqdakpvesskekitleskkcniakksnksgpesmnssnyccelccnpactgcy (SEQ ID NO:______; see GenBank® Accession No. P07965 (gi:3915589)). The immature (including pre and pro regions) form of Y. enterocolitica ST protein has the sequence: mkkivfvlylmlssfgafgqetvsgqfsdalstpitaevykqacdpplppaevssdwdccdvccnpacagc (SEQ ID NO:; see GenBank® Accession No. S25659 (gi:282047)).

[0322] The peptides of the invention, like the bacterial ST peptides, have six Cys residues. These six Cys residues form three disulfide bonds in the mature and active form of the peptide. If the six Cys residues are identified, from the amino to carboxy terminus of the peptide, as A, B, C, D, E, and F, then the disulfide bonds form as follows: A-D, B-E, and C—F. The formation of these bonds is thought to be important for GC-C receptor binding. Certain of the peptides of the invention include a potentially functional chymotrypsin cleavage site, e.g., a Trp, Tyr or Phe located between either Cys B and Cys D or between Cys E and Cys F. Cleavage at either chymotrypsin cleavage site may reduce or eliminates the ability of the peptide to bind to the GC-C receptor.

[0323] In the human body an inactive form of chymotrypsin, chymotrypsinogen is produced in the pancreas. When this inactive enzyme reaches the small intestine it is converted to active chymotrypsin by the excision of two di-peptides. Active chymotrypsin can potentially cleave peptides at the peptide bond on the carboxy-terminal side of Trp, Tyr or Phe. The presence of active chymotrypsin in the intestinal tract can potentially lead to cleavage of certain of the peptides of the invention having an appropriately positioned functional chymotrypsin cleavage site. It is expected that chymotrypsin cleavage will moderate the action of a peptide of the invention having an appropriately positioned chymotrypsin cleavage site as the peptide passes through the intestinal tract.

[0324] Trypsinogen, like chymotrypsin, is a serine protease that is produced in the pancreas and is present in the digestive tract. The active form, trypsin, will cleave peptides having a Lys or Arg. The presence of active trypsin in the intestinal tract can lead to cleavage of certain of the peptides of the invention having an appropriately positioned functional trypsin cleavage site. It is expected that chymotrypsin cleavage will moderate the action of a peptide of the invention having an appropriately positioned trypsin cleavage site as the peptide passes through the intestinal tract.

[0325] Many gastrointestinal disorders, including IBS, are associated with abdominal or visceral pain. Certain of the peptides of the invention include analgesic or antinociceptive tags such as the carboxy-terminal sequence AspPhe immediately following a Trp, Tyr or Phe that creates a functional chymotrypsin cleavage site or following Lys or Arg that creates a functional trypsin cleavage site. Chymotrypsin in the intestinal tract can potentially cleave such peptides immediately carboxy terminal to the Trp, Phe or Tyr residue, releasing the dipeptide, AspPhe. This dipeptide has been shown to have analgesic activity in animal models (Abdikkahi et al. 2001 Fundam Clin Pharmacol 15:117-23; Nikfar et al 1997, 29:583-6; Edmundson et al 1998 Clin Pharmacol Ther 63:580-93). In this manner such peptides can treat both pain and inflammation. Other analgesic peptides can be present at the amino or carboxy terminus of the peptide (e.g., following a functional cleavage site) including: endomorphin-1, endomorphin-2, nocistatin, dalargin, lupron, and substance P.

[0326] A number of the useful peptides are based on the core sequence: Cys Cys Glu L̅e̅u̅ Cys Cys Asn Pro Ala Cys T̅h̅r̅ Gly Cys Tyr. To create a variant having a potentially functional chymotrypsin cleavage site capable of inactivating the peptide, either the Leu (underlined) or the Thr (underlined) can be replaced by Trp, Phe or Tyr or both the Leu and the Thr can be replaced by (independently) Trp, Phe or Tyr. To create a variant having an analgesic di-peptide, the core sequence is followed by Asp Phe. The carboxy terminal Tyr in the core sequence can allow the Asp Phe dipeptide to be released by chymotrypsin in the digestive tract. The core sequence can be optionally be preceded by Asn Ser Ser Asn Tyr or Asn.

[0327] Thus, useful variants based on the core sequence include:

| | |
|---|---|
| Asn Ser Ser Asn Tyr Cys Cys Glu Leu Cys Cys Asn Pro Ala Cys Thr Gly Cys Tyr | (SEQ ID NO: 4) |
| Asn Ser Ser Asn Tyr Cys Cys Glu Leu Cys Cys Asn Pro Ala Cys Trp Gly Cys Tyr | (SEQ ID NO: ---) |
| Asn Ser Ser Asn Tyr Cys Cys Glu Tyr Cys Cys Asn Pro Ala Cys Thr Gly Cys Tyr | (SEQ ID NO: 5) |
| Cys Cys Glu Leu Cys Cys Asn Pro Ala Cys Thr Gly Cys Tyr | (SEQ ID NO: 8) |
| Cys Cys Glu Leu Cys Cys Asn Pro Ala Cys Trp Gly Cys Tyr | (SEQ ID NO: ---) |
| Cys Cys Glu Tyr Cys Cys Asn Pro Ala Cys Thr Gly Cys Tyr | (SEQ ID NO: 3) |
| Asn Cys Cys Glu Leu Cys Cys Asn Pro Ala Cys Thr Gly Cys Tyr | (SEQ ID NO: ---) |
| Asn Cys Cys Glu Leu Cys Cys Asn Pro Ala Cys Trp Gly Cys Tyr | (SEQ ID NO: ---) |
| Asn Cys Cys Glu Phe Cys Cys Asn Pro Ala Cys Thr Gly Cys Tyr | (SEQ ID NO: ---) |
| Asn Cys Cys Glu Tyr Cys Cys Asn Pro Ala Cys Thr Gly Cys Tyr | (SEQ ID NO: ---) |
| Asn Cys Cys Glu Trp Cys Cys Asn Pro Ala Cys Thr Gly Cys Tyr | (SEQ ID NO: ---) |
| Asn Cys Cys Glu Arg Cys Cys Asn Pro Ala Cys Thr Gly Cys Tyr | (SEQ ID NO: ---) |
| Asn Cys Cys Glu Lys Cys Cys Asn Pro Ala Cys Thr Gly Cys Tyr | (SEQ ID NO: ---) |
| Asn Ser Ser Asn Tyr Cys Cys Glu Leu Cys Cys Asn Pro Ala Cys Thr Gly Cys Tyr | (SEQ ID NO: ---) |
| Asp Phe | |
| Asn Ser Ser Asn Tyr Cys Cys Glu Leu Cys Cys Asn Pro Ala Cys Trp Gly Cys Tyr | (SEQ ID NO: ---) |
| Asp Phe | |
| Asn Ser Ser Asn Tyr Cys Cys Glu Phe Cys Cys Asn Pro Ala Cys Thr Gly Cys Tyr | (SEQ ID NO: ---) |
| Asp Phe | |
| Asn Ser Ser Asn Tyr Cys Cys Glu Tyr Cys Cys Asn Pro Ala Cys Thr Gly Cys Tyr | (SEQ ID NO: ---) |
| Asp Phe | |
| Asn Ser Ser Asn Tyr Cys Cys Glu Trp Cys Cys Asn Pro Ala Cys Thr Gly Cys Tyr | (SEQ ID NO: ---) |
| Asp Phe | |
| Asn Ser Ser Asn Tyr Cys Cys Glu Arg Cys Cys Asn Pro Ala Cys Thr Gly Cys Tyr | (SEQ ID NO: ---) |
| Asp Phe | |
| Asn Ser Ser Asn Tyr Cys Cys Glu Lys Cys Cys Asn Pro Ala Cys Thr Gly Cys Tyr | (SEQ ID NO: ---) |
| Asp Phe | |
| Cys Cys Glu Leu Cys Cys Asn Pro Ala Cys Thr Gly Cys Tyr Asp Phe | (SEQ ID NO: ---) |
| Cys Cys Glu Leu Cys Cys Asn Pro Ala Cys Trp Gly Cys Tyr Asp Phe | (SEQ ID NO: ---) |
| Cys Cys Glu Phe Cys Cys Asn Pro Ala Cys Thr Gly Cys Tyr Asp Phe | (SEQ ID NO: ---) |
| Cys Cys Glu Tyr Cys Cys Asn Pro Ala Cys Thr Gly Cys Tyr Asp Phe | (SEQ ID NO: ---) |
| Cys Cys Glu Trp Cys Cys Asn Pro Ala Cys Thr Gly Cys Tyr Asp Phe | (SEQ ID NO: ---) |
| Cys Cys Glu Arg Cys Cys Asn Pro Ala Cys Thr Gly Cys Tyr Asp Phe | (SEQ ID NO: ---) |
| Cys Cys Glu Lys Cys Cys Asn Pro Ala Cys Thr Gly Cys Tyr Asp Phe | (SEQ ID NO: ---) |
| Asn Cys Cys Glu Leu Cys Cys Asn Pro Ala Cys Thr Gly Cys Tyr Asp Phe | (SEQ ID NO: ---) |
| Asn Cys Cys Glu Leu Cys Cys Asn Pro Ala Cys Trp Gly Cys Tyr Asp Phe | (SEQ ID NO: ---) |
| Asn Cys Cys Glu Phe Cys Cys Asn Pro Ala Cys Thr Gly Cys Tyr Asp Phe | (SEQ ID NO: ---) |
| Asn Cys Cys Glu Tyr Cys Cys Asn Pro Ala Cys Thr Gly Cys Tyr Asp Phe | (SEQ ID NO: ---) |
| Asn Cys Cys Glu Trp Cys Cys Asn Pro Ala Cys Thr Gly Cys Tyr Asp Phe | (SEQ ID NO: ---) |
| Asn Cys Cys Glu Arg Cys Cys Asn Pro Ala Cys Thr Gly Cys Tyr Asp Phe | (SEQ ID NO: ---) |
| Asn Cys Cys Glu Lys Cys Cys Asn Pro Ala Cys Thr Gly Cys Tyr Asp Phe | (SEQ ID NO: ---) |

[0328] In some cases, the peptides of the invention are produced as a prepro protein that includes the amino terminal leader sequence: mkksilfiflsvlsfspfaqdakpvesskekitleskkcniakksnksgpesmn. Where the peptide is produced by a bacterial cell, e.g., E. coli, the forgoing leader sequence will be cleaved and the mature peptide will be efficiently secreted from the bacterial cell. U.S. Pat. No. 5,395,490 describes vectors, expression systems and methods for the efficient production of ST peptides in bacterial cells and methods for achieving efficient secretion of mature ST peptides. The vectors, expression systems and methods described in U.S. Pat. No. 5,395,490 can be used to produce the ST peptides and variant ST peptides of the present invention

### Variant Peptides

[0329] The invention includes variant peptides which can include one, two, three, four, five, six, seven, eight, nine, or ten (in some embodiments fewer than 5 or fewer than 3 or 2 or fewer) amino acid substitutions and/or deletions compared to SEQ ID NOs:______ to ______. The substitution(s) can be conservative or non-conservative. The naturally-occurring amino acids can be substituted by D-isomers of any amino acid, non-natural amino acids, natural and natural amino acid analogs and other groups. A conservative amino acid substitution results in the alteration of an amino acid for a similar acting amino acid, or amino acid of like charge, polarity, or hydrophobicity. At some positions, even conservative amino acid substitutions can alter the activity of the peptide. A conservative substitution can substitute a naturally-occurring amino acid for a non-naturally-occurring amino acid. The amino acid substitutions among naturally-occurring amino acids are listed in Table II.

TABLE II

| For Amino Acid | Code | Replace with any of |
|---|---|---|
| Alanine | Ala | Gly, Cys, Ser |
| Arginine | Arg | Lys, His |
| Asparagine | Asn | Asp, Glu, Gln, |
| Aspartic Acid | Asp | Asn, Glu, Gln |
| Cysteine | Cys | Met, Thr, Ser |
| Glutamine | Gln | Asn, Glu, Asp |
| Glutamic Acid | Glu | Asp, Asn, Gln |
| Glycine | Gly | Ala |
| Histidine | His | Lys, Arg |
| Isoleucine | Ile | Val, Leu, Met |
| Leucine | Leu | Val, Ile, Met |
| Lysine | Lys | Arg, His |
| Methionine | Met | Ile, Leu, Val |
| Phenylalanine | Phe | Tyr, His, Trp |
| Proline | Pro | |
| Serine | Ser | Thr, Cys, Ala |
| Threonine | Thr | Ser, Met, Val |
| Tryptophan | Trp | Phe, Tyr |
| Tyrosine | Tyr | Phe, His |
| Valine | Val | Leu, Ile, Met |

[0330] In some circumstances it can be desirable to treat patients with a variant peptide that binds to and activates intestinal GC-C receptor, but is less active than the non-variant form the peptide. This reduced activity can arise from reduced affinity for the receptor or a reduced ability to activate the receptor once bound or reduced stability of the peptide.

### Production of Peptides

[0331] Useful peptides can be produced either in bacteria including, without limitation, E. coli, or in other existing systems for peptide or protein production (e.g., Bacillus subtilis, baculovirus expression systems using Drosophila Sf9 cells, yeast or filamentous fungal expression systems, mammalian cell expression systems), or they can be chemically synthesized.

[0332] If the peptide or variant peptide is to be produced in bacteria, e.g., E. coli, the nucleic acid molecule encoding the peptide will preferably also encode a leader sequence that permits the secretion of the mature peptide from the cell. Thus, the sequence encoding the peptide can include the pre sequence and the pro sequence of, for example, a naturally-occurring bacterial ST peptide. The secreted, mature peptide can be purified from the culture medium.

[0333] The sequence encoding a peptide of the invention is preferably inserted into a vector capable of delivering and maintaining the nucleic acid molecule in a bacterial cell. The DNA molecule may be inserted into an autonomously replicating vector (suitable vectors include, for example, pGEM3Z and pcDNA3, and derivatives thereof). The vector nucleic acid may be a bacterial or bacteriophage DNA such as bacteriophage lambda or M13 and derivatives thereof. Construction of a vector containing a nucleic acid described herein can be followed by transformation of a host cell such as a bacterium. Suitable bacterial hosts include but are not limited to, E. coli, B. subtilis, Pseudomonas, Salmonella. The genetic construct also includes, in addition to the encoding nucleic acid molecule, elements that allow expression, such as a promoter and regulatory sequences. The expression vectors may contain transcriptional control sequences that control transcriptional initiation, such as promoter, enhancer, operator, and repressor sequences. A variety of transcriptional control sequences are well known to those in the art. The expression vector can also include a translation regulatory sequence (e.g., an untranslated 5′ sequence, an untranslated 3′ sequence, or an internal ribosome entry site). The vector can be capable of autonomous replication or it can integrate into host DNA to ensure stability during peptide production.

[0334] The protein coding sequence that includes a peptide of the invention can also be fused to a nucleic acid encoding a polypeptide affinity tag, e.g., glutathione S-transferase (GST), maltose E binding protein, protein A, FLAG tag, hexa-histidine, myc tag or the influenza HA tag, in order to facilitate purification. The affinity tag or reporter fusion joins the reading frame of the peptide of interest to the reading frame of the gene encoding the affinity tag such that a translational fusion is generated. Expression of the fusion gene results in translation of a single polypeptide that includes both the peptide of interest and the affinity tag. In some instances where affinity tags are utilized, DNA sequence encoding a protease recognition site will be fused between the reading frames for the affinity tag and the peptide of interest.

[0335] Genetic constructs and methods suitable for production of immature and mature forms of the peptides and variants of the invention in protein expression systems other than bacteria, and well known to those skilled in the art, can also be used to produce peptides in a biological system.

[0336] Mature peptides and variants thereof can be synthesized by the solid-phase chemical synthesis. For example, the peptide can be synthesized on Cyc(4-CH₂ Bxl)-OCH₂-4-(oxymethyl)-phenylacetamidomethyl resin using a double coupling program. Protecting groups must be used appropriately to create the correct disulfide bond pattern. For example, the following protecting groups can be used: t-butyloxycarbonyl (alpha-amino groups); acetamidomethyl (thiol groups of Cys residues B and E); 4-methylbenzyl (thiol groups of Cys residues C and F); benzyl (y-carboxyl of glutamic acid and the hydroxyl group of threonine, if present); and bromobenzyl (phenolic group of tyrosine, if present). Coupling is effected with symmetrical anhydride of t-butoxylcarbonylamino acids or hydroxybenzotriazole ester (for asparagine or glutamine residues), and the peptide is deprotected and cleaved from the solid support in hydrogen fluoride, dimethyl sulfide, anisole, and p-thiocresol using 8/1/1/0.5 ratio (v/v/v/w) at 0° C. for 60 min. After removal of hydrogen fluoride and dimethyl sulfide by reduced pressure and anisole and p-thiocresol by extraction with ethyl ether and ethyl acetate sequentially, crude peptides are extracted with a mixture of 0.5M sodium phosphate buffer, pH 8.0 and N,N-dimethylformamide using 1/1 ratio, v/v. The disulfide bond for Cys residues B and E is the formed using dimethyl sulfoxide (Tam et al. (1991) J. Am. Chem. Soc. 113:6657-62). The resulting peptide is the purified by reverse-phase chromatography. The disulfide bond between Cys residues C and F is formed by first dissolving the peptide in 50% acetic acid in water. Saturated iodine solution in glacial acetic acid is added (1 ml iodine solution per 100 ml solution). After incubation at room temperature for 2 days in an enclosed glass container, the solution is diluted five-fold with deionized water and extracted with ethyl ether four times for removal of unreacted iodine. After removal of the residual amount of ethyl ether by rotary evaporation the solution of crude product is lyophilized and purified by successive reverse-phase chromatography.

[0337] Peptides can also be synthesized by many other methods including solid phase synthesis using traditional FMOC protection (i.e., coupling with DCC-HOBt and deprotection with piperidine in DMF). Cys thiol groups can be trityl protected. Treatment with TFA can be used for final deprotection of the peptide and release of the peptide from the solid-state resin. In many cases air oxidation is sufficient to achieve proper disulfide bond formation.

### Example 1

### Preparation of Variant ST Peptides and Wild-Type ST Peptide

[0338] 1a: Preparation of Recombinant Variant ST Peptides and Wild-Type ST Peptide

[0339] A variant ST peptide having the sequence Asn Ser Ser Asn Tyr Cys Cys Glu Tyr Cys Cys Asn Pro Ala Cys Thr Gly Cys Tyr (SEQ ID NO:5) was produced recombinantly and tested in an animal model. A peptide having the sequence of the wild-type ST peptide was also created (SEQ ID NO:4).

[0340] SEQ ID NO:5 and SEQ ID NO:4 peptides were produced as preproproteins using vectors produced as follows. A sequence encoding a heat-stable enterotoxin pre-pro sequence was amplified from pGK51/pGSK51 (ATCC 67728) using oligonucleotide M03514 (5′ CACACCATATGAAGAAATCAATATTATTTATTTTTCTTTCTG 3′ (SEG ID NO:______)) and oligonucleotide M03515 (5′ CACACCTCGAGTTAGGTCTCCATGCTTTCAGGACCACTTTTATTAC 3′ (SEQ ID NO:______)). The amplification product fragment was digested with NdeI/XhoI and ligated to the T7 expression vector, pET26b(+) (Novagen) digested with NdeIXhoI thereby creating plasmid MB3976. The region encoding the pre-pro protein was sequenced and found to encode the amino acid sequence: mkksilfiflsvlsfspfaqdakpagsskekitleskkcnivkksnksgpesm (SEQ ID NO:______) which differs from the amino acid sequence of heat-stable enterotoxin a2 precursor (sta2; mkksilfiflsvlsfspfaqdakpagsskekitleskkcnivkknnesspesm (SEQ ID NO:______); GenBank® Accession No. Q47185, GI: 3913876) at three positions (indicated by underlining and bold text) near the C-terminus. To create expression vectors with the pre-pro sequence, complementary oligos encoding each ST peptide variant or wild-type ST peptide were annealed and cloned into the MB3976 expression vector. To create MB3984 (encoding SEQ ID NO:4 peptide (wild-type ST peptide) as a prepro protein), containing the amino acid sequence, NSSNYCCELCCNPACTGCY (SEQ ID NO:) fused downstream of the pre-pro sequence, MB 3976 was digested with BsaI/XhoI and ligated to annealed oligos MO3621 (5′ GCATGAATAGTAGCAATTACTGCTGTGAATTGTGTTGTAATCCTGCTT GTACCGGGTGCTATTAATAAC 3′ (SEQ ID NO:______)) and M03622 (5′ TCGAGTTATTAATAGCACCCGGTACAAGCAGGATTACAACACAATTC ACAGCAGTAATTGCTACTATTC 3′ (SEQ ID NO:______)). To create MB3985 (encoding SEQ ID NO:5 as a prepro protein) containing the following amino acid sequence, NSSNYCCEYCCNPACTGCY fused downstream of the pre-pro sequence, MB 3976 was digested with BsaI/XhoI and ligated to annealed oligos MO3529 (5′ GCATGAATAGTAGCAATTACTGCTGTGAATATTGTTGTAATCCTGCTT GTACCGGGTGCTATTAATAAC 3′ (SEQ ID NO:______)) and MO3530 (5′ TCGAGTTATTAATAGCACCCGGTACAAGCAGGATTACAACAATATTC ACAGCAGTAATTGCTACTATTC 3′ (SEQ ID NO:______)).

[0341] The SEQ ID NO:5 peptide and the SEQ ID NO:4 peptide were produced as follows. The expression vectors were transformed into E. coli bacterial host BL21 λDE3 (Invitrogen). A single colony was innoculated and grown shaking overnight at 30° C. in L broth+25 mg/l kanamycin. The overnight culture was added to 3.2 L of batch medium (Glucose 25 g/l, Caseamino Acids 5 g/l, Yeast Extract 5 g/l, KH₂PO₄ 13.3 g/l, (NH₄)₂HPO₄ 4 g/l, MgSO₄-7H₂0 1.2 g/l, Citric Acid 1.7 g/l, EDTA 8.4 mg/l, CoCl₂-6H₂O 2.5 mg/l, MnCl₂-4H₂O 15 mg/l, CuCl₂-4H₂O 1.5 mg/l, H₃BO₃ 3 mg/l, Na₂MoO₄-2H₂0 2.5 mg/l, Zn Acetate-2H₂0 13 mg/l, Ferric Citrate 100 mg/l, Kanamycin 25 mg/l, Antifoam DF₂0₄ 1 ml/l) and fermented using the following process parameters: pH 6.7—control with base only (28% NH₄OH), 30° C., aeration: 5 liters per minute. After the initial consumption of batch glucose (based on monitoring dissolved oxygen (DO) levels), 1.5 L of feed medium (Glucose 700 g/l, Caseamino Acids 10 g/l, Yeast Extract 10 g/l, MgSO₄-7H₂0 4 g/l, EDTA 13 mg/l, CoCl₂-6H₂O 4 mg/l, MnCl₂-4H₂0 23.5 mg/l, CuCl₂-4H₂0 2.5 mg/l, H₃BO₃ 5 mg/l, Na₂MoO₄-2H₂0 4 mg/l, Zn Acetate-2H₂0 16 mg/l, Ferric Citrate 40 mg/l, Antifoam DF₂0₄ 1 ml/) was added at a feed rate controlled to maintain 20% DO. IPTG was added to 0.2 mM 2 hours post feed start. The total run time was approximately 40-45 hours (until feed exhaustion).

[0342] Cells were collected by centrifugation at 5,000 g for 10 minutes. The cell pellet was discarded and the supernatant was passed through a 50 Kd ultrafiltration unit. The 50 Kd filtrate (0.6 liters) was loaded onto a 110 ml Q-Sepharose fast Flow column (Amersham Pharmacia, equilibrated with 20 mM Tris-HCl pH 7.5) at a flow rate of 400 ml/hour. The column was washed with six volumes of 20 mM Tris-HCl pH 7.5 and proteins were eluted with 50 mM acetic acid collecting 50 ml fractions. Fractions containing ST peptide variant or wild-type ST peptide were pooled and the solvent was removed by rotary evaporation. The dried proteins were resuspended in 10 ml of 8% acetic acid, 0.1% trifluoroacetic acid (TFA) and loaded onto a Varian Polaris C18-A column (250×21.2 mm 10 μm, equilibrated in the same buffer) at a flow rate of 20 ml/min. The column was washed with 100 ml of 8% methanol, 0.1% TFA and developed with a gradient (300 ml) of 24 to 48% methanol, 0.1% TFA, collecting 5-ml fractions. Fractions containing peptide were pooled and the solvent was removed by rotary evaporation. The peptides were dissolved in 0.1% TFA and lyophilized.

[0343] The SEQ ID NO:5 peptide and SEQ ID NO:4 peptide fractions were analyzed by standard LCMS and HPLC. LCMS analysis revealed that SEQ ID NO:5 peptide is more homogeneous than SEQ ID NO: 4 peptide (see FIG. 1a; note that SEQ ID NO:5 peptide exhibits fewer peaks (Panel B) than SEQ ID NO:4 peptide (Panel A)).

[0344] 1b: Preparation of Synthetic Variant ST Peptides and Wild-Type ST Peptide

[0345] Peptides were chemically synthesized by a commercial peptide synthesis company. Varying yields of peptides were obtained depending on the efficiency of chemical synthesis. Thus, the four peptides, in decreasing order of yield were: Cys Cys Glu Tyr Cys Cys Asn Pro Ala Cys Thr Gly Cys Tyr (SEQ ID NO:3), 10-20% yield; Cys Cys Glu Leu Cys Cys Asn Pro Ala Cys Thr Gly Cys Tyr (SEQ ID NO:8); Asn Ser Ser Asn Tyr Cys Cys Glu Tyr Cys Cys Asn Pro Ala Cys Thr Gly Cys Tyr (SEQ ID NO:5); Asn Ser Ser Asn Tyr Cys Cys Glu Leu Cys Cys Asn Pro Ala Cys Thr Gly Cys Tyr (SEQ ID NO:4), <5% yield. Thus the specific amino acid changes introduced into the peptides can create improved manufacturing properties.

[0346] FIG. 1b shows the total ion chromatograph profile of synthetically manufactured SEQ ID NO:3 peptide. FIG. 1c shows the total ion chromatograph profile of the control blank sample. There is one major peak present in the SEQ ID NO:3 peptide sample that is not also present in the control sample. Quantitative analysis suggests the SEQ ID NO:3 peptide is >98% pure.

### Example 2

### Activation of the Intestinal GC-C Receptor by a Variant ST Peptide and ST Peptide

[0347] The ability of SEQ ID NO:5, SEQ ID NO:4, SEQ ID NO:3, and SEQ ID NO:6 to activate the intestinal GC-C receptor was assessed in an assay employing the T84 human colon carcinoma cell line (American Type Culture Collection (Bethesda, Md.)). For the assays cells were grown to confluency in 24-well culture plates with a 1:1 mixture of Ham's F12 medium and Dulbecco's modified Eagle's medium (DMEM), supplemented with 5% fetal calf serum and were used at between passages 54 and 60.

[0348] Briefly, monolayers of T84 cells in 24-well plates were washed twice with 1 ml/well DMEM, then incubated at 37° C. for 10 min with 0.45 ml DMEM containing 1 mM isobutylmethylxanthine (IBMX), a cyclic nucleotide phosphodiesterase inhibitor. Test peptides (50 μl) were then added and incubated for 30 minutes at 37° C. The media was aspirated and the reaction was then terminated by the addition of ice cold 0.5 ml of 0.1N HCl. The samples were held on ice for 20 minutes and then evaporated to dryness using a heat gun or vacuum centrifugation. The dried samples were resuspended in 0.5 ml of phosphate buffer provided in the Cayman Chemical Cyclic GMP EIA kit (Cayman Chemical, Ann Arbor, Mich.). Cyclic GMP was measured by EIA according to procedures outlined in the Cayman Chemical Cyclic GMP EIA kit.

[0349] FIGS. 2a and 2b show the activity of chemically synthesized peptide variants in this GC-C receptor activity assay. In this assay, SEQ ID NO:4 and two different SEQ ID NO:3 peptides (SEQ ID NO:3(a) and SEQ ID NO:3(b), synthesized by two different methods) had activity comparable to SEQ ID NO:4. SEQ ID NO:5 and SEQ ID NO:4 peptide were chemically synthesized in a manner identical to that of SEQ ID NO:3(b). SEQ ID NO:6 was chemically synthesized in a manner identical to that of SEQ ID NO:3(a).

### Example 3

### Intestinal Transit in Rodents can be Increased by Administering Certain Peptides

[0350] In order to determine whether the peptides increase the rate of gastrointestinal transit, the peptides and controls were tested using a murine gastrointestinal transit (GIT) assay (Moon et al. Infection and Immunity 25:127, 1979). In this assay, charcoal, which can be readily visualized in the gastrointestinal tract is administered to mice after the administration of a test compound. The distance traveled by the charcoal is measured and expressed as a percentage of the total length of the colon.

[0351] Mice were fasted with free access to water for 12 to 16 hours before the treatment with peptide or control buffer. The peptides were orally administered at 1 μg/kg-1 mg/kg of peptide in buffer (20 mM Tris pH 7.5) 7 minutes before being given an oral dose of 5% Activated Carbon (Aldrich 242276-250G). Control mice were administered buffer only before being given a dose of Activated Carbon. After 15 minutes, the mice were sacrificed and their intestines from the stomach to the cecum were dissected. The total length of the intestine as well as the distance traveled from the stomach to the charcoal front was measured for each animal and the results are expressed as the percent of the total length of the intestine traveled by the charcoal front. All results are reported as the average of 10 mice±standard deviation. A comparison of the distance traveled by the charcoal between the mice treated with peptide versus the mice treated with vehicle alone was performed using a Student's t test and a statistically significant difference was considered for P<0.05. P-values are calculated using a two-sided T-Test assuming unequal variances.

[0352] As can be seen in FIG. 3a and FIG. 3b, wild-type ST peptide SEQ ID NO:4, (Sigma-Aldrich, St Louis, Mo.); 0.1 mg/kg), synthetically manufactured SEQ ID NO:3 and Zelnorm® (0.1 mg/kg), a drug approved for IBS that is an agonist for the serotonin receptor 5HT4, increase gastrointestinal transit rate in this model. FIG. 4a shows the result of a study demonstrating that intestinal transit rate increases with an increasing dosage of either recombinantly synthesized SEQ ID NO:4 or SEQ ID NO:5. FIG. 4b shows the results of a study demonstrating both chemically synthesized SEQ ID NO:4 or SEQ ID NO:3 peptide increase intestinal transit rates more than either Tris buffer alone or an equivalent dose of Zelnorm®.

[0353] The identical experiment was performed to determine if SEQ ID NO:3 is effective in a chronic dosing treatment regimen. Briefly, 8 week old CD1 female mice are dosed orally once a day for 5 days with either SEQ ID NO:3 (0.06 mg/kg or 0.25 mg/kg in 20 mM Tris pH 7.5) or vehicle alone (20 mM Tris pH 7.5). On the 5^{th} day, a GIT assay is performed identical to that above except 200 μl of a 10% charcoal solution is administered. FIG. 4c shows the results of a study demonstrating both chemically synthesized SEQ ID NO:3 or Zelnorm® are effective in a mouse gastrointestinal motility assay upon chronic dosing (daily for 5 days). The results are shown side by side with acute dosing (1 day).

[0354] The gastrointestinal transit assay was also performed in male and female CD rats (Charles River; Wilmington, Mass.) weighing between 136-191 g with an average weight of 167.6 g. The assay was performed as described above for mice except an average of 5-8 animals were used for each test group and test peptide and 5% activated carbon were administered simultaneously (versus 7 minutes apart). In addition, the animals were sacrificed 10 minutes after the administration of peptide and test compound. FIG. 4d shows the results of a study demonstrating that intestinal transit increases following the administration of SEQ ID NO:3, but not Zelnorm® in the rat GIT assay. FIG. 4e shows the results of a study demonstrating that intestinal transit increases in a dose dependent manner with the administration of either SEQ ID NO:3 or SEQ ID NO:6 in female rats. Similar effects were seen in male rats.

[0355] The gastrointestinal transit assay was also performed in wild-type mice and mice lacking the guanylate cyclase C receptor (GC-C KO; Mann et al 1997 Biochem and Biophysical Research Communications 239:463). Wild type and GC-C KO mice were fasted overnight and SEQ ID NO:3 or vehicle alone were orally administered 10 minutes prior to an oral dose of a 10% Activated Carbon/10% Gum Arabic suspension. Animals were sacrificed 5 minutes after peptide or vehicle administration. FIG. 4F shows the results of the gastrointestinal transit assay in 14 wild-type and 14 GC-C KO female mice. In vehicle treated animals, no difference was observed in transit rate between wild-type and GC-C KO animals. When compared to vehicle (20 mM Tris pH 7.5) alone, an increase (p<0.001) in gastrointestinal transit rate was observed upon oral treatment with 100 g/kg of SEQ ID NO:3 in wild-type but not GC-C KO mice. Similar effects were observed in male mice.

### Example 4

### Certain Peptides Increase Intestinal Secretion in Suckling Mice (SuMi Assay)

[0356] SEQ ID NO:4 peptide and SEQ ID NO:3 were tested for their ability to increase intestinal secretion using a suckling mouse model of intestinal secretion. In this model a test compound is administered to suckling mice that are between 7 and 9 days old. After the mice are sacrificed, the gastrointestinal tract from the stomach to the cecum is dissected (“guts”). The remains (“carcass”) as well as the guts are weighed and the ratio of guts to carcass weight is calculated. If the ratio is above 0.09, one can conclude that the test compound increases intestinal secretion. FIG. 5a shows a dose response curve for wild-type ST peptide (SEQ ID NO:4) in this model. FIG. 5b shows dose response curve for the SEQ ID NO:3 peptide in this model. These data show that wild-type ST peptide (purchased from TDT, Inc. West Chester, Pa.) and the SEQ ID NO:3 peptide increase intestinal secretion. The effect of Zelnorm® was also studied. As can be seen from FIG. 5, Zelnorm® at 0.2 mg/kg does not increase intestinal secretion in this model. FIG. 6a shows a dose response curve for the recombinant SEQ ID NO:4 peptide described above and the recombinant SEQ ID NO:5 peptide described above. As can be seen from FIG. 6a, both peptides increase intestinal secretion in this model. Similarly FIG. 6b shows a dose response curve for chemically synthesized SEQ ID NO:5, SEQ ID NO:3 and SEQ ID NO:4 as well as wild-type ST peptide (purchased from Sigma-Aldrich, St Louis, Mo.). FIG. 6c shows a dose response curve for chemically synthesized SEQ ID NO:3 and SEQ ID NO:6.

### Colonic Hyperalgesia Animal Models

[0357] Hypersensitivity to colorectal distension is common in patients with IBS and may be responsible for the major symptom of pain. Both inflammatory and non-inflammatory animal models of visceral hyperalgesia to distension have been developed to investigate the effect of compounds on visceral pain in IBS.

[0358] I. Trinitrobenzenesulphonic Acid (TNBS)-Induced Rectal Allodynia in Two Rodent Models

### TNBS Visceral Hypersensitivity Rat Model

[0359] Male Wistar rats (220-250 g) were premedicated with 0.5 mg/kg of acepromazine injected intraperitoneally (IP) and anesthetized by intramuscular administration of 100 mg/kg of ketamine. Pairs of nichrome wire electrodes (60 cm in length and 80 μm in diameter) were implanted in the striated muscle of the abdomen, 2 cm laterally from the white line. The free ends of electrodes were exteriorized on the back of the neck and protected by a plastic tube attached to the skin. Electromyographic (EMG) recordings were started 5 days after surgery. Electrical activity of abdominal striated muscle was recorded with an electroencephalograph machine (Mini VIII, Alvar, Paris, France) using a short time constant (0.03 sec.) to remove low-frequency signals (<3 Hz).

[0360] Ten days post surgical implantation, trinitrobenzenesulphonic acid (TNBS) was administered to induce rectal inflammation. TNBS (80 mg kg⁻¹ in 0.3 ml 50% ethanol) was administered intrarectally through a silicone rubber catheter introduced at 3 cm from the anus under light diethyl-ether anesthesia, as described (Morteau et al. 1994 Dig Dis Sci 39:1239). Following TNBS administration, rats were placed in plastic tunnels where they were severely limited in mobility for several days before colorectal distension (CRD). Experimental compound was administered one hour before CRD which was performed by insertion into the rectum, at 1 cm of the anus, a 4 cm long balloon made from a latex condom (Gue et al, 1997 Neurogastroenterol. Motil. 9:271). The balloon was fixed on a rigid catheter taken from an embolectomy probe (Fogarty). The catheter attached balloon was fixed at the base of the tail. The balloon, connected to a barostat, was inflated progressively by step of 15 mmHg, from 0 to 60 mmHg, each step of inflation lasting 5 min. Evaluation of rectal sensitivity, as measured by EMG, was performed before (1-2 days) and 3 days following rectal instillation of TNBS.

[0361] The number of spike bursts that corresponds to abdominal contractions was determined per 5 min periods. Statistical analysis of the number of abdominal contractions and evaluation of the dose-effects relationships was performed by a one way analysis of variance (ANOVA) followed by a post-hoc (Student or Dunnett tests) and regression analysis for ED50 if appropriate.

[0362] FIG. 7a shows the results of experiment in which SEQ ID NO:3 activity was analyzed in the TNBS colorectal model. Significant decreases in abdominal response are observed at 0.3 μg/kg and 3 μg/kg SEQ ID NO:3. These results demonstrate that SEQ ID NO:3 reduces pain associated with colorectal distension in this animal model.

### TNBS Visceral Hypersensitivity Model in Wild-Type (WT) Mice and Mice Lacking the Guanylate-Cyclase C Receptor (GC-C KO)

[0363] TNBS induced visceral hypersensitivity was assessed in WT and GC-C KO mice. Two groups (WT and GC-C KO) of male mice (22-25 g) were surgically prepared for electromyographic (EMG) recordings. Three electrodes were implanted in the striated muscles of the abdomen for EMG recording of abdominal contractions. Colorectal distension (CRD) was performed with a balloon inflated by 10s steps of 0.02 ml from 0 to 0.12 ml. Under basal conditions mice were submitted to control CRD (time 0) followed by oral administration of SEQ ID NO:3 (0.01 and 0.3 μg/kg) or vehicle only (distilled water, 1 ml) at 3 hours. One hour post dosing the CRD procedure was repeated. Abdominal EMG contractile response to colorectal distension in basal conditions in both WT and GC-C KO mice (12-14 mice per group) was determined in the absence of vehicle and SEQ ID NO:3, and the mean+/−standard error of the mean (SEM) is graphically depicted in FIG. 7c. GC-C KO mice exhibited a decreased EMG contractile response to CRD when compared to wild-type mice. SEQ ID NO:3 dosing of WT and GC-C KO mice under basal conditions decreased the EMG response to colorectal distension in WT but not GC-C KO mice.

[0364] For TNBS induced visceral hypersensitivity conditions, mice were submitted to control CRD (time 0) and TNBS (20 mg/kg) was administered at 3 days. Three days post intracolonic TNBS-induction animals were orally administered SEQ ID NO:3 (0.01 and 0.3 μg/kg) or vehicle (distilled water, 1 ml) 1 hour before CRD. The effect of SEQ ID NO:3 (0.01 g/kg) on abdominal response to colorectal distension after TNBS in WT and GC-C KO mice (12-14 per group) at a volume distension of 0.8 ml was determined and the mean+/−standard error of the mean (SEM) is graphically depicted in FIG. 7d. SEQ ID NO:3 reduces the TNBS induced hypersensitivity to CRD in WT mice at 0.01 μg/kg. A similar effect was not observed in GC-C KO mice.

[0365] II. Partial Restraint Stress-Induced Hyperalgesia Model

[0366] Five groups of female Wistar rats (weighing 200-250 g each), were surgically prepared for electromyography as described (Morteau et al. 1994 Dig Dis Sci 39:1239-48) and were used to evaluate the effects of SEQ ID NO:3 on colorectal sensitivity and compliance after a 2 hour partial restraint stress session. Partial restraint stress (PRS), a relatively mild stress, was induced as previously described (Morteau et al. 1994 Dig Dis Sci 39:1239-48). Female rats were lightly anesthetized with diethyl ether and their shoulders, upper forelimbs and thoracic trunk were wrapped in a confining harness of paper tape to restrict, but not prevent body movements. Control sham-stress animals were anesthetized but not wrapped. Animals received isobaric colorectal distensions (CRD) directly prior to (control CRD) and 15 minutes after two hours of partial restraint induced stress. Rats were treated orally with SEQ ID NO:3 (0.3, 3, 30 ug/kg) or vehicle only (distilled water 1 mL) one hour before the CRD procedure. For the CRD procedure, rats were acclimatized to restraint in polypropylene tunnels (diameter: 7 cm; length: 20 cm) periodically for several days before CRD in order to minimize recording artifacts. The balloon used for distension was 4 cm long and made from a latex condom. It was fixed on a rigid catheter taken from an embolectomy probe (Fogarty). CRD was performed by insertion of the balloon in the rectum at 1 cm from the anus. The tube was fixed at the base of the tail. Isobaric distensions were performed from 0 to 60 mmHg, with each distension step lasting 5 minutes. The first distension was performed at a pressure of 15 mmHg and an increment of 15 mmHg was added at each following step, until a maximal pressure of 60 mmHg was attained. Electromyographic recordings commenced 5 days after surgery. Electrical activity was recorded with an electroencephalograph (Mini VIII, Alvar, Paris, France) using a short time constant (0.03 sec.) to remove low-frequency signals (<3 Hz) and a paper speed of 3.6 cm/minute. Isobaric distensions of the colon were performed by connecting the balloon to a computerized barostat. Colonic pressure and balloon volume were continuously monitored on a potentiometric recorder (L6514, Linseis, Selb, Germany) with a paper speed of 1.0 cm/minute. The number of spike bursts, corresponding to abdominal contractions, was evaluated per 5-minute period. Colorectal volumes were determined as the maximal volume obtained for each stage of distension using the potentiometric recorder. Statistical analysis of these two parameters was performed using a one way analysis of variance (ANOVA) followed by an unpaired two-tailed Student's t test using GraphPad Prism 4.0. p values<0.05 were considered significantly different. The values were expressed as mean±SEM. FIG. 7b shows the results of an experiment in which SEQ ID NO:3 activity was analysed in the Stress-Induced Hyperalgesia model. SEQ ID NO:3 reduced the response to CRD after PRS (p<0.0001) at a distending pressure of 15 mm Hg when administered at doses of 0.3 and 3.0 μg/kg.

[0367] III. Water Avoidance Stress-Induced Hyperalgesia Model

[0368] The effect of SEQ ID NO:3 on basal visceral nociception in a model of water avoidance stress-induced visceral hyperalgesia in adult male Wistar rats was tested. The stress involved confining rats to a platform surrounded by water for a period of 1 hour and then measuring their visceromotor response to colonic distension using electromyography (EMG).

[0369] At least 7 days prior to stress measurements, animals were deeply anesthetized with pentobarbital sodium (45 mg/kg) and equipped with electrodes implanted into the external oblique musculature, just superior to the inguinal ligament. Electrode leads were then tunneled subcutaneously and externalized laterally for future access. Following surgery, rats were housed in pairs and allowed to recover for at least 7 days. On the day of the experiment, animals were lightly anesthetized with halothane, and a lubricated latex balloon (6 cm) was inserted intra-anally into the descending colon. Animals were allowed to recover for 30 minutes, and colorectal distension (CRD) was initiated. The CRD procedure consisted of graded intensities of phasic CRD (10, 20, 40, 60 mmHg; 20 s duration; 4 min inter-stimulus interval). Visceromotor response (VMR) to CRD was quantified by measuring EMG activity. To determine the effects of SEQ ID NO:3 on basal visceral nociception, a baseline CRD was recorded. Animals were allowed 1 hour recovery and then SEQ ID NO:3 or vehicle was orally administered. At 1 hour following administration of SEQ ID NO:3 or vehicle CRD was repeated. Administration of 30 μg/kg of SEQ ID NO:3 increased basal visceral nociception as compared to vehicle only. The mean value (+/−SEM) of in vehicle and SEQ ID NO:3 treated groups (n=7 for each group) is graphically depicted in FIG. 7e. Oral administration of SEQ ID NO:3 at a lower dose (3 μg/kg) had no effects on basal visceral.

[0370] To determine the effect of SEQ ID NO:3 in a model of water avoidance stress-induced visceral hyperalgesia, a baseline CRD was recorded and then the animals were subjected to 1 hour of water avoidance stress. For water avoidance stress, the test apparatus consisted of a Plexiglas tank with a block affixed to the center of the floor. The tank was filled with fresh room temperature water (25° C.) to within 1 cm of the top of the block. The animals were placed on the block for a period of 1 h. The sham water avoidance stress consisted in placing the rats on the same platform in a waterless container. A second CRD was performed at 24 hours post water avoidance stress. Following the second CRD, animals were allowed 1 hour recovery and then SEQ ID NO:3 or vehicle was orally administered. At 1 hour following administration of SEQ ID NO:3 or vehicle CRD was repeated. Following water avoidance stress, 3 μg/kg of SEQ ID NO:3 exhibited anti-hyperalgesic properties, by reducing the increased visceromotor response to colorectal distension (CRD) 24 hours after stress. This effect is graphically depicted (mean+/−SEM; n=7) in FIG. 7f.

### Phenylbenzoquinone-Induced Writhing Model

[0371] The PBQ-induced writhing model can be used to assess pain control activity of the peptides and GC-C receptor agonists of the invention. This model is described by Siegmund et al. (1957 Proc. Soc. Exp. Bio. Med. 95:729-731). Briefly, one hour after oral dosing with a test compound, e.g., a peptide, morphine or vehicle, 0.02% phenylbenzoquinone (PBQ) solution (12.5 mL/kg) is injected by intraperitoneal route into the mouse. The number of stretches and writhings are recorded from the 5^{th} to the 10^{th} minute after PBQ injection, and can also be counted between the 35^{th} and 40^{th} minute and between the 60^{th} and 65^{th} minute to provide a kinetic assessment. The results are expressed as the number of stretches and writhings (mean±SEM) and the percentage of variation of the nociceptive threshold calculated from the mean value of the vehicle-treated group. The statistical significance of any differences between the treated groups and the control group is determined by a Dunnett's test using the residual variance after a one-way analysis of variance (P<0.05) using SigmaStat Software.

[0372] FIGS. 8a and 8b show the effect of different doses of SEQ ID NO:5 and SEQ ID NO:3 in the PBQ writhing assay. Indomethacin, an NSAID (nonsteroidal anti-inflammatory drug) with known pain control activity, was used as the positive control in the assay. Significant reductions in writhings were observed for SEQ ID NO:5 (1 mg/kg dose) and SEQ ID NO:3 (2.5 mg/kg dose) compared to the vehicle control. Loss of efficacy at the highest dose tested has also been observed for multiple other compounds (such as 5HT-3 antagonists) tested in similar assays. The results of this study suggest that both SEQ ID NO:5 and SEQ ID NO:3 have antinociceptive effects in this visceral pain model comparable to the intermediate doses of indomethacin.

### Example 5

### SEQ ID NO:3 Kd Determination and Binding Assays

[0373] To determine the affinity of SEQ ID NO:3 for GC-C receptors found in rat intestinal mucosa, a competition binding assay was performed using rat intestinal epithelial cells. Epithelial cells from the small intestine of rats were obtained as described by Kessler et al. (J. Biol. Chem. 245: 5281-5288 (1970)). Briefly, animals were sacrificed and their abdominal cavities exposed. The small intestine was rinsed with 300 ml ice cold saline or PBS. 10 cm of the small intestine measured at 10 cm from the pylorus was removed and cut into 1 inch segments. Intestinal mucosa was extruded from the intestine by gentle pressure between a piece of parafilm and a P-1000 pipette tip. Intestinal epithelial cells were placed in 2 ml PBS and pipetted up and down with a 5 ml pipette to make a suspension of cells. Protein concentration in the suspension was measured using the Bradford method (Anal Biochem. 72: 248-254 (1976)).

[0374] A competition binding assay was performed based on the method of Giannella et al. (Am. J. Physiol. 245: G492-G498) between [¹²⁵I] labeled SEQ ID NO:4 and SEQ ID NO:3. The assay mixture contained: 0.5 ml of DME with 20 mM HEPES-KOH pH 7.0, 0.9 mg of the cell suspension listed above, 21.4 fmol [¹²⁵I]-SEQ ID NO:4 (42.8 μM), and different concentrations of competitor SEQ ID NO:3 (0.01 to 1000 nM). The mixture was incubated at room temperature for 1 hour, and the reaction stopped by applying the mixture to GF/B glass-fiber filters (Whatman). The filters were washed with 5 ml ice-cold PBS and radioactivity was measured. FIG. 9a shows that the Kd for SEQ ID NO:3 in this assay is 4.5 nm. % B/Bo is the percentage of the ratio of radioactivity trapped in each sample (B) compared to the radioactivity retained in a control sample with no cold competitor (Bo). Giannella et al. (Am. J. Physiol. 245: G492-G498) observed that the Kd for wild-type ST peptide in this same assay was ˜13 nm.

[0375] Similar competition binding assays were performed in intestinal epithelial cells from wild-type and guanylate cyclase C knockout (GC-C KO; Mann et al. 1997 Biochem and Biophysical Research Communications 239:463) mice. Mouse intestinal epithelial cells were prepared identical to that above as for rat intestinal epithelial cells except the cells were homogenized with an Omni homogenizer for 20 seconds on the maximum setting to make a suspension of cells. A competition binding assay was performed identical to that described above between ¹²⁵I labeled SEQ ID NO:3 and unlabeled SEQ ID NO:3 (competitor). FIG. 9b shows the results of an assay in which ¹²⁵I-SEQ ID NO:3 was prepared and incubated alone or with an excess of unlabeled SEQ ID NO:3 with isolated intestinal epithelial cells from two female wild-type and two female GC-C KO mice. There is a reduction in SEQ ID NO:3 binding to intestinal epithelial cells from GC-C KO mice when compared to wild-type mice.

[0376] The binding of SEQ ID NO:3 and SEQ ID NO:6 to GC-C receptors on the cell surface of human colonic cells (T84 cells1 ATCC Catalog No. CCL-248) was characterized in a competitive radioligand-binding assay at pH conditions of 5, 7 and 8. The radiolabeled tracer used in these experiments was ¹²⁵I-SEQ ID NO:7. To determine binding constants, competitive inhibition of binding was used. T84 cells were cultured in T-150 plastic flasks in DMEM and Ham's F-12 medium containing 5% fetal bovine serum. Monolayers at 60-70% confluency (approximately 10⁷ cells) were collected by gentle scraping followed by centrifugation, and washed twice in 50 mL of phosphate-buffered saline (PBS). The cells were resuspended in 1 mL DMEM containing 20 mM N-(2-hydroxymethyl)piperazine-N′-(2-ethanesulfonic acid) (Hepes), pH 7.0 and 0.5% bovine serum albumin (BSA). T84 cells were incubated with a constant amount of ¹²⁵I-SEQ ID NO:7 containing various concentrations of cold competitor. Free ¹²⁵I-SEQ ID NO:7 was separated from bound tracer by rapid suction filtration. The binding reactions were carried out in 1.5 mL microfuge tubes in 0.24 mL of DMEM/20 mM Hepes pH 7.0/0.5% BSA containing: 2.5×10⁵ T84 cells (0.25 mg protein), 200,000 cpm ¹²⁵I-SEQ ID NO:7 (41 fmol, 170 μM), and 0.01 to 1,000 nM competitor. Binding assays at pH 5.0 were done in DMEM/20 mM 2-(N-morpholino) ethanesulfonic acid (Mes), pH 5.0. Binding assays in pH 8.0 were done in DMEM/20 mM Hepes/50 mM sodium bicarbonate pH 8.0. One sample contained no competitor (B₀) and another contained no cells. After incubation at 37° C. for 1 h, the reaction mixtures were applied to Whatman GF/B glass-fiber filters by suction filtration. The filters were then rinsed with 10 mL ice-cold PBS buffer, inserted into plastic tubes, and added to 2 mL scintillation fluid. Radioactivity was measured in a LS 6500 liquid scintillation counter (Beckman-Coulter). The percent bound in each sample is calculated by the equation:

% B/B₀=(sample cpm−no cells cpm)×100/(B₀ cpm−no cells cpm)

[0377] Competitive radioligand-binding curves were generated using the Graphpad PRISM™ computer program. Nonlinear regression analysis of the binding data was used to calculate the concentration of competitor that resulted in 50% radioligand bound (IC₅₀). The apparent dissociation equilibrium constant (Kᵢ) for each competitor was obtained from the IC₅₀ values and the previously reported estimate of the dissociation constant for the radioligand, K_{d}≈15 nM (Hamra et al. 1997 PNAS 2705-10) and the method of Cheng and Prusoff 1973 Biochem Pharmacol 22:3099-108. Using a two site model, high and low affinity-binding sites were identified on T84 cells (Kᵢ₁ and Kᵢ₂) for all the test agents. At pH 7.0. for SEQ ID NO:3 Kᵢ₁ ranged from 0.89-1.23 nM and Kᵢ₂ ranged from 88.9-156 nM. The SEQ ID NO:6 binding affinities at pH 7.0 were Kᵢ₁=1.57 nM and Kᵢ₂=446 nM. The SEQ ID NO:3 binding affinities at pH 5.0 were Kᵢ₁=1.38 nM and Kᵢ₂=17 nM. At pH 8.0 the high and low affinity binding sites were Kᵢ₁=0.6 and Kᵢ₂=94.4 nM respectively. Thus, binding of SEQ ID NO:3 to the high affinity site, Kᵢ₁, was not affected by pH.

### Example 6

### Pharmacokinetic Properties of SEQ ID NO:3

[0378] To study the pharmacokinetics of SEQ ID NO:3, absorbability studies in mice were performed by administering SEQ ID NO:3 intravaneously via tail vein injection or orally by gavage to 8-week-old CD1 mice. Serum was collected from the animals at various time points and tested for the presence of SEQ ID NO:3 using a competitive enzyme-linked immunoabsorbent assay (Oxoid, ST EIA kit, Cat#TD0700). The assay utilized monoclonal antibodies against ST peptide (antibodies are provided in the Oxoid kit) and synthetically manufactured SEQ ID NO:3. FIG. 10a shows absorption data for intravenously and orally administered SEQ ID NO:3 as detected by the ELISA assay. SEQ ID NO:3 appears to be minimally systemically absorbed and is <2.2% bioavailable.

[0379] A similar bioavailability study was performed in which LCMS rather than ELISA was used to detect SEQ ID NO:3. Initially, serum samples were extracted from the whole blood of exposed and control mice, then injected directly (10 mL) onto an in-line solid phase extraction (SPE) column (Waters Oasis HLB 25 μm column, 2.0×15 mm direct connect) without further processing. The sample on the SPE column was washed with a 5% methanol, 95% dH₂O solution (2.1 mL/min, 1.0 minute), then loaded onto an analytical column using a valve switch that places the SPE column in an inverted flow path onto the analytical column (Waters Xterra MS C8 5 μm IS column, 2.1×20 mm). The sample was eluted from the analytical column with a reverse phase gradient (Mobile Phase A: 10 mM ammonium hydroxide in dH₂O, Mobile Phase B: 10 mM ammonium hydroxide in 80% acetonitrile and 20% methanol; 20% B for the first 3 minutes then ramping to 95% B over 4 min. and holding for 2 min., all at a flow rate of 0.4 mL/min.). At 9.1 minutes, the gradient returns to the initial conditions of 20% B for 1 min. SEQ ID NO:3 eluted from the analytical column at 1.45 minutes, and was detected by triple-quadrapole mass spectrometry (MRM, 764 (+2 charge state)>182 (+1 charge state) Da; cone voltage=30V; collision=20 eV; parent resolution=2 Da at base peak; daughter resolution=2 Da at base peak). Instrument response was converted into concentration units by comparison with a standard curve using known amounts of chemically synthesized SEQ ID NO:3 prepared and injected in mouse serum using the same procedure.

[0380] FIG. 10b shows absorption data for IV and orally administered SEQ ID NO:3 as detected by LCMS. In this assay, SEQ ID NO:3 appears similarly minimally systemically absorbed and is <0.11% bioavailable.

[0381] Similarly, oral bioavailability was determined in rats using LCMS methodology. Rat plasma samples containing SEQ ID NO:3 and/or SEQ ID NO:6 were extracted using a Waters Oasis MAX 96 well solid phase extraction (SPE) plate. A 200 μL volume of rat plasma was mixed with 200 μL of ¹³C₉, ¹⁵N—SEQ ID NO:3 in the well of a prepared SPE plate. The samples were drawn through the stationary phase with 15 mm Hg vacuum. All samples were rinsed with 200 μL of 2% ammonium hydroxide in water followed by 200 μL of 20% methanol in water. The samples were eluted with consecutive 100 μL volumes of May 20, 1975 formic acid/water/methanol and 100 μL 5/15/80 formic acid/water/methanol. The samples were dried under nitrogen and resuspended in 100 μL of 20% methanol in water. Samples were analyzed by a Waters Quattro Micro mass spectrometer coupled to a Waters 1525 binary pump with a Waters 2777 autosampler. A 40 μL volume of each sample was injected onto a Thermo Hypersil GOLD C18 column (2.1×50 mm, 5 um). SEQ ID NO:3 and SEQ ID NO:6 were eluted by a gradient over 3 minutes with acetonitrile and water containing 0.05% trifluoroacetic acid. The Quattro Micro mass spectrometer was run in multiple reaction monitoring (MRM) mode using the mass transitions of 764>182 and 682>136 for SEQ ID NO:3 and SEQ ID NO:6 respectively. Using this methodology, SEQ ID NO:3 was dosed orally and by IV to rats at 10 mg/kg. The area under the curve (AUC) for orally dosed SEQ ID NO:3 was 776.6 nM-min, while the AUC for intravenously administered SEQ ID NO:3 was 738,855 nM-min. In addition, SEQ ID NO:6 was detected in the plasma of rats dosed with SEQ ID NO:3, showing that this is a metabolite in rats. The AUC for SEQ ID NO:6 in rats dosed orally with SEQ ID NO:3 was 216 nM-min and the AUC for SEQ ID NO:6 in SEQ ID NO:3 intravenously dosed rats was 3580 nM-min. From the AUC values, the 6 h bioavailability of SEQ ID NO:3 determined by circulating plasma levels is 0.11%. When AUC values for SEQ ID NO:6 are included in the calculation, the 6 h bioavailability increases to 0.13%. To determine the oral bioavailability of SEQ ID NO:6, this peptide was dosed to rats at 10 mg/kg. In this experiment, the limit of detection (LOD) for SEQ ID NO:6 was 0.78 nM. SEQ ID NO:6 was detected at all time points for the intravenous dose and was not detected beyond 240 min for the oral dose. For non-detected values, the LOD was used as an upper estimate of the concentration of SEQ ID NO:6. The calculated value for AUCp.o., (0-6h) was <1308 nM-min and AUCi.v.,(0-6h) was 1,590,000 nM-min. The 6 h bioavailability of SEQ ID NO:6 determined by circulating plasma levels was 0.08%

[0382] Oral bioavailability was also determined using a radioimmunoassay (RIA) detection method. Female CD-1 mice (Charles River, Wilmington, Mass.) weighing approximately 25 g (7-8 weeks old) or female CD rats (Charles River, Wilmington, Mass.) weighing approximately 153 g were included in this study. Monoclonal antibody, 20C1 (Brandwein et al. 1985 Infect Immun. 47:242-246), which recognizes SEQ ID NO:7 and 1251 labeled—SEQ ID NO:7, a labeled tracer, were used in these experiments. The labeled tracer was purified by HPLC using a Waters C-18u Bondapak® column (25 cm) previously equilibrated with 10 mM ammonium acetate pH 5.8. A gradient from 0 to 25% acetonitrile was applied to the column in 60 min, followed by isocratic elution at 25% acetonitrile for another 20 min. This method separated two monoiodinated forms from each other and from unlabeled precursor (Thompson et al. 1985 Anal Biochem. 148:26-36). The first monoiodinated peak (Peak 1) had a retention time of 60 min and corresponded to iodination of the C-terminal tyrosine, and was used as the labeled tracer in this study. The labeled tracer had a specific activity of 2200 Ci/mmol. The tracer was stored in aliquots at −20° C. Animals were fasted overnight before administration of compounds. Animals received SEQ ID NO:3 (rats −10 mg/kg; mice 8 mg/kg) or vehicle alone (20 mM Tris-HCl, ph7.5) intravenously or orally. Blood was drawn from all dosed animals by retro-orbital eye bleeding at specific intervals and test compound levels were analyzed by radioimmunoassay (RIA). SEQ ID NO:3 was extracted from the serum or plasma using Amersham Biosciences Amprep C18 columns (100 mg). Samples (80 μL) were first diluted to 0.5 mL with start buffer (8% methanol, 0.095% TFA in water) and applied to C18 columns previously conditioned with 1 mL methanol and equilibrated with 2 mL of start buffer. After washing with 1 mL start buffer, SEQ ID NO:3 was eluted with 0.8 mL of 80% methanol, 0.05% TFA and dried down in a centrifugal evaporator. Samples were reconstituted in 0.194 mL assay buffer (PBS buffer, pH 7.4, containing 10% fetal bovine serum). Standard dilutions of SEQ ID NO:3 (0 to 256 nM) were made in rat plasma. To perform RIA analysis, samples from dosed animal and standards were mixed with 5 μL diluted antibody (in RIA wash buffer: phosphate-buffered saline (PBS) containing 0.1% bovine serum albumin (BSA), 1:40,000 final dilution, 0.0022 μg), and incubated 1 to 4 h at 4° C. One tube contained the zero standard (B₀) and another no standard and no antibody (non-specific binding, NSB). Labeled tracer (0.018 Ci, diluted in RIA wash buffer) was then added and incubated at 4° C. for 12 to 18 h. The antibody bound fraction containing SEQ ID NO:3 was collected by magnetic separation using 10 μL of sheep anti-mouse IgG beads previously washed twice in 10 volumes RIA assay buffer. The beads were then washed twice with 1 mL of RIA wash buffer, collected by magnetic separation, resuspended in 0.1 mL of RIA wash buffer, and added to 2 mL scintillation fluid. Radioactivity was measured in a LS 6500 scintillation counter (Beckman-Coulter). The binding efficiency is defined as the percent radioactivity in the B₀ sample compared to the input counts. The percent bound in each sample was calculated by the equation:

% B/B₀=(sample cpm−NSB cpm)×100/(B₀ cpm−NSB cpm)

[0383] A standard curve was prepared by plotting % B/B₀ as a function of the log SEQ ID NO:3 concentration. A concentration vs. time plot was generated from the data in GraphPad Prism or Summit Software PK Solutions 2.0 to generate oral and i.v. PK curves. The area under the curve from T=0 to 4 hours (AUC₀₋₄ₕ) was calculated by the software for both p.o. and i.v. dosed animals. If the values were below the lower limit of detection (LOD) than the LOD was used to estimate the value (in this experiment 2 nM). Oral Bioavailability (F) is calculated using the equation:

F=(AUC_{p.o.,(0-4}h)*D_{i.v.})/(AUC_{i.v.,(0-4}h)*D_{p.o.})

where D_{i.v.} and D_{p.o.} equal the intravenous and oral dose, respectively. For SEQ ID NO:3 administered to mice, the calculated AUC_{p.o.,(0-4h)} was ≦0.69 ug-min/mL, the AUC_{i.v.,(0-4h)} was 1660.98 ug-min/mL and the bioavailability (F) was ≦0.04%. The estimated bioavailability of 8 mg/kg SEQ ID NO:3 in mice using the RIA method is not more than 0.04% over 4 hours. For SEQ ID NO:3 administered to rats, the calculated value of AUC_{p.o.,(0-6h)} was 2.90 ug-min/mL, the AUC_{i.v.,(0-6h)} was 1422.64 ug-min/mL and the bioavailability was 0.20%. The estimated bioavailability of 10 mg/kg SEQ ID NO:3 in rats using the RIA method is not more than 0.20% over 6 hours.

### Example 7

### In Vitro Proteolytic Stability of SEQ ID NO:3

[0384] The stability of SEQ ID NO:3 in the presence of several mammalian digestive enzymes was determined. SEQ ID NO:3 was exposed to a variety of in vitro conditions including digestive enzymes and low ph environments designed to simulate gastric fluid. SEQ ID NO:3 was incubated with chymotrypsin, trypsin, pepsin, aminopeptidase, carboxypeptidase A, and simulated gastric fluid (sgf) at ph 1.0. Samples were collected at 0, 3, and 24 h for all conditions except pepsin digestion and the SGF. For the latter two conditions, samples were obtained at 0, 1, and 3 h. Negative control samples were prepared for initial and final time points. A separate, positive activity control was run in parallel to SEQ ID NO:3. All samples were analyzed by LC/MS

### Chymotrypsin

[0385] 500 μl samples of 0.01 mg/mL SEQ ID NO:3 and guanylin (Sigma-Aldrich, G116; positive control) were prepared in the chymotrypsin reaction buffer (100 mM Tris-HCl, 10 mM CaCl₂, pH 7.5) in 2 mL eppendorf tubes. Zero and 24 h control samples were prepared by adding 5 μL of a 10 mM chymostatin (Sigma-Alrich, C7268; a chymotrypsin inhibitor) stock for a final concentration of 100 μM. All samples were incubated at 37° C. for 5 min. 20 μL of a 0.01 mg/mL chymotrypsin stock (α-chympotrypsin from bovine pancreas; Sigma-Aldrich, C6423) were added to each sample for a 0.0004 mg/mL final concentration. Samples were returned to the 37° C. water bath. The reaction was quenched with 5 μL of a 10 mM chymostatin stock at each time point for a final concentration of 100 μM. No extra chymostatin was added to the control samples as they already had inhibitor. Samples were subsequently flash frozen in liquid nitrogen, and stored at −80° C. until analysis. Upon analysis, samples were thawed and transferred to a 1 mL 96-well plate. Standards of SEQ ID NO:3 and guanylin were prepared in chymotrypsin reaction buffer at 0.625, 1.25, 2.50, 5.00, and 10.00 μg/mL concentrations. These standards were used to generate a standard curve for quantification of samples. When necessary, the standard curves were also used to calculate the concentration of the corresponding digestion product. 10 μL injections were made of each sample and standard.

### Trypsin

[0386] 500 μL samples of 0.01 mg/mL SEQ ID NO:3 and BAEE (Nₐₗₚₕₐ Benzoyl-L-arginine ethyl ester hydrochloride; Sigma-Aldrich, B4500; positive control) were prepared with trypsin reaction buffer (100 mM Tris-HCl, pH 7.5) in 2 mL eppendorf tubes. Zero and 24 h time point control samples were prepared were prepared (N=1) with 5 μL of a 100 mg/mL AEBSF (4-(2-Aminoethyl)benzenesulfonyl fluoride hydrochloride; a trypsin inhibitor) stock for a final concentration of 1 mg/mL. All control and test samples (0, 3, and 24 h) were incubated at 37° C. for 5 min. Twenty (20) μL of a 0.01 mg/mL trypsin (Sigma-Aldrich, T6467) stock were added to each sample for a final concentration of 0.0004 mg/mL. Samples were returned to the 37° C. water bath. The reaction was quenched with 5 μL of a 100 mg/mL AEBSF stock, which was added to each sample at the indicated timepoint, for a final concentration of 1 mg/mL. No extra AEBSF was added to the control samples as they already had inhibitor. Samples were subsequently flash frozen in liquid nitrogen, and stored at −80° C. until analysis. Upon analysis, samples were thawed and transferred to a 1 mL 96-well plate. Standards of SEQ ID NO:3 and BAEE were prepared in trypsin reaction buffer at 0.625, 1.25, 2.50, 5.00, and 10.00 μg/mL concentrations. These standards were used to generate a standard curve for quantification of samples. When necessary, the standard curves were also used to calculate the concentration of the corresponding digestion product. Ten (10) μL injections were made of each sample and standard.

### Pepsin

[0387] 500 μL samples of 100 U/mL pepsin (Pepsin porcine gastric mucosa; Sigma-Aldrich, P68871; U=release of 0.01 absorbance at 280 nM (A280) as TCA soluble hydrolysis products per min at 37° C. of hemoglobin) were prepared in the pepsin reaction buffer (100 mM HCl-KCl, pH 2.0) in 5 mL polystyrene round bottom tubes. To the control samples (0 and 24 h), 500 μL of a 1 M ammonium acetate (pepsin inhibitor) stock were added, for a final concentration of 0.5 M. All control and test samples (0, 1, and 3 h) were incubated at 37° C. for 5 min, while shaking. Fifty (50) μL of 0.1 mg/mL SEQ ID NO:3 and Insulin B chain, oxidized (Sigma-Aldrich, 16383; positive control), stocks were added to the respective tubes. Samples were returned to the 37° C. shaking water bath. Reactions were quenched by the addition of 500 μL of 1 M ammonium acetate for a final concentration of 0.5 M (except to the control samples, which already contained 0.5 M ammonium acetate). Samples were cooled on ice and stored at 4° C. until analysis. Upon analysis, samples were transferred to a 1 mL 96-well plate. Standards of SEQ ID NO:3 and Insulin B chain, oxidized, were prepared in 25 mM Tris-hydrochloric acid, 500 mM sodium chloride, pH 7.5 buffer at 0.625, 1.25, 2.50, 5.00, and 10.00 μg/mL concentrations. These standards were used to generate a standard curve for quantification of samples. Ten (10) μL injections were made of each sample and standard.

### Aminopeptidase

[0388] 500 μL samples of 0.01 mg/mL SEQ ID NO:3 and chemically synthesized SEQ ID NO:4 (wild type ST; positive control) were prepared in the aminopeptidase reaction buffer (5 mM Tris-HCl, 5 mM MgCl₂, pH 7.5) in 2 mL eppendorf tubes. 5 μL of a 5 mg/mL Bestatin hydrochloride (BioChemika, 08170; an aminopeptidase inhibitor) stock was added to each control sample (0 and 24 h), for a final concentration of 0.05 mg/mL. All control and test samples (0, 3, and 24 h) were incubated at 37° C. for 5 min. 0.02 U aminopeptidase (Aminopeptidase M, amino acid aryl amidase (Roche, 102768; U=hydrolysis of 1.0 umol of L-leucinamide to leucine and NH₃ per min at pH 8.5 at 25° C.) were added to each sample. Samples were returned to the 37° C. water bath. The reaction was quenched with 5 μL of a 5 mg/mL Bestatin hydrochloride stock at the proper time point. No extra Bestatin hydrochloride was added to the control samples since they already had inhibitor present. Samples were subsequently flash frozen in liquid nitrogen, and stored at −80° C. until analysis. Upon analysis, samples were thawed and transferred to a 1 mL 96-well plate. Standards of SEQ ID NO:3 and SEQ ID NO:4 were prepared in aminopeptidase reaction buffer at 0.625, 1.25, 2.50, 5.00, and 10.00 μg/mL concentrations. These standards were used to generate a standard curve for quantification of samples. When necessary, the standard curves were also used to calculate the concentration of the corresponding digestion product. Ten (10) μL injections were made of each sample and standard.

### Carboxypeptidase A

[0389] 500 μL samples of 0.01 mg/mL SEQ ID NO:3 and N-CBZ-Glycine-Glycine-Leucine (Z-Gly-Gly-Leu; Sigma-Aldrich, C8501; positive control) were prepared in the carboxypeptidase A reaction buffer (25 mM Tris-HCl, 500 mM NaCl, pH 7.5) in 2 mL eppendorf tubes. Five (5) μL of a 40 μg/mL carboxypeptidase inhibitor (carboxypeptidase inhibitor from potato tuber (Sigma-Aldrich, C0279) stock was added to each control sample (0 and 24 h), for a final concentration of 0.4 μg/mL. All control and test (0, 3 and 24 h) samples were incubated at 37° C. for 5 min. Twenty (20) μL of a 0.01 mg/mL carboxypeptidase A (Carboxypeptidase A from human pancreas; Sigma-Aldrich, C5358) stock was added to each sample. The samples were returned to the 37° C. water bath. The reaction was quenched with 5 μL of a 40 μg/mL carboxypeptidase inhibitor at the proper time point. No extra carboxypeptidase inhibitor was added to the control samples since there was already inhibitor present. Samples were subsequently flash frozen in liquid nitrogen, and stored at −80° C. until analysis. Upon analysis, samples were thawed and transferred to a 1 mL 96-well deep microtiter plate. Standards of SEQ ID NO:3 and Z-Gly-Gly-Leu were prepared in carboxypeptidase A reaction buffer at 0.625, 1.25, 2.50, 5.00, and 10.00 μg/mL concentrations. These standards were used to generate a standard curve for quantification of samples. When necessary, the standard curves were also used to calculate the concentration of the corresponding digestion product. Ten (10) μL injections were made of each sample and standard. As shown in FIG. 13a, Z-Gly-Gly-Leu, was proteolyzed by carboxypeptidase A. The Z-Gly-Gly-Leu TO control and TO samples had average calculated concentrations of 7.1 (+/−0.30) μg/mL. No precursor mass was detected in T3 h and T24 h samples. The calculated concentrations of the Z-Gly-Gly-Leu products for T3 h and T24 h samples were 2.2 (+/−0.010) μg/mL. As shown in FIG. 13b, some proteolysis of SEQ ID NO:3 was observed upon treatment with carboxypeptidase A. The SEQ ID NO:3 calculated concentrations of all samples were 8.4 (+/−1.2) μg/mL. For the SEQ ID NO:3 time 0 control and time 0 samples the calculated concentrations for the SEQ ID NO:3 products were 0.8 (+/−0.02) μg/mL and 0.8 (+/−0.01) μg/mL, respectively. The T3 h and T24 h samples had average calculated SEQ ID NO:3 product concentrations of 1.3 (+/−0.06) μg/mL and 1.3 (+/−0.04) μg/mL, respectively.

### Carboxypeptidase A—Identification of Proteolysis Product

[0390] To further study the SEQ ID NO:3 carboxypeptidase A digestion product, samples of 0.01 mg/mL SEQ ID NO:3 were prepared in the carboxypeptidase A reaction buffer at a total volume of 500 μL in 2 mL eppendorf tubes. Triplicate samples were prepared for the following time points: 0, 15, 30, 60, 120, 180 and 240 min. The samples were incubated at 37° C. for 5 min. Twenty (20) μL of a 0.01 mg/mL carboxypeptidase A stock were added to each sample and returned to the 37° C. water bath. The reactions were quenched with 5 μL of a 40 μg/mL carboxypeptidase inhibitor at the proper time points. Samples were subsequently flash frozen in liquid nitrogen, and stored at −80° C. until analysis. Upon analysis, samples were thawed and transferred to a 1 mL 96-well plate. Standards of SEQ ID NO:3 were prepared in carboxypeptidase A reaction buffer at 0.625, 1.25, 2.50, 5.00, and 10.00 μg/mL concentrations. These standards were used to generate a standard curve for quantification of samples. When necessary, the standard curves were also used to calculate the concentration of the corresponding digestion product. Ten (10) μL injections were made of each sample and standard. If the formation of a digestion product was evident, then a spectral analysis was used to determine the mass of the digestion product, and predict its possible identity. Direct comparison between the total ion current (TIC) chromatograms from digestion at time 0 min (T0) and 240 min (T240) revealed a peak at 3.3 min in the T240 chromatogram (upper panel, FIG. 13c) that was not present in the TO chromatogram (lower panel, FIG. 13c). The retention time of SEQ ID NO:3 was 3.51 min. A spectral view of the 3.3 min peak indicates the mass of the digestion product is 1362 Da. The spectrum shows 3 singly charged species representing protonated, ammoniated, and sodiated ions with mass/charge (m/z) ratio of 1363 ([M+H]⁺), 1380 ([M+NH₄]⁺), 1385 ([M+Na]⁺) (FIG. 13d). The sum of the areas of all 3 adducts increased over time (FIG. 13e). A digestion product mass of 1362 Da corresponds to the loss of the carboxy-terminal tyrosine residue of (SEQ ID NO:6), the first expected product of carboxypeptidase A proteolysis. SEQ ID NO:6 is a peptide that corresponds to the proposed SEQ ID NO:3 carboxypeptidase A cleavage product (it is sequentially identical to SEQ ID NO:3 minus the carboxy-terminal tyrosine residue). This peptide was used as a standard to quantify digestion product formation. The increase in concentration of SEQ ID NO:6 was proportional to the disappearance of SEQ ID NO:3. Based on these findings, SEQ ID NO:6 appears to be the sole digestion product of SEQ ID NO:3 under these in vitro conditions. The SEQ ID NO:3 average concentration at T0 was 5115 (+/−121) nM. The concentration decreased with time, with the T240 average concentration calculated to be 4438 (+/−188) nM. The average concentration of SEQ ID NO:6 at T0 was 108 (+/−2) nM. The concentration increased with time, with the T240 average concentration calculated to be 726 (+/−138) nM. When comparing the rate of disappearance of SEQ ID NO:3 with the rate of formation of SEQ ID NO:6, both rates decreased at 60 min and leveled off at 120 min. In addition, the sum of the concentration of SEQ ID NO:3 and SEQ ID NO:6 remains essentially constant over the 4 h incubation. A graphical representation of the data is shown in FIG. 13f. The initial SEQ ID NO:3 concentration used was 5113 nM.

### Simulated Gastric Fluid (SGF)

[0391] Samples of 153 μg/mL SEQ ID NO:3 were prepared in the simulated gastric fluid buffer (0.2% NaCl (w/v), 0.7% HCl (v/v), pH 1) to a total volume of 500 μL in 2 mL eppendorf tubes. The reference control and test samples (0, 1 and 3 h) were incubated at 37° C. for the time point indicated. The reference control sample was diluted 10-fold (1000 μL volume) in distilled water for a final concentration of 10 μM and chilled on ice. At each time point, samples were diluted 10-fold (1000 μL volume) in distilled water for an expected concentration of 10 μM, and chilled on ice, until analysis. Upon analysis, samples were transferred to a 1 mL 96-well plate. Standards of SEQ ID NO:3 were prepared in distilled water at 0.625, 1.25, 2.50, 5.00, and 10.00 μM concentrations. These standards were used to generate a standard curve for quantification of samples. Ten (10) μL injections were made of each sample and standard.

[0392] Table III summarizes the results of SEQ ID NO:3 in vitro proteolytic stability experiments

| | Cleavage of SEQ ID |
|---|---|
| | NO: 3 by proteolytic |
| Proteolytic substance | substance |
| Chymotrypsin | not detectable |
| Pepsin | not detectable |
| Aminopeptidase | not detectable |
| Carboxypetidase A | Yes |
| Simulated gastric fluid | not detectable |

### Example 8

### SEQ ID NO:3 Results in an Increase in Bristol Stool Form Scale Scores for Consistency of Bowel Movements in Humans after a Single Dose

[0393] Single doses of 30, 100, 300, 1000 or 3000 μg of chemically synthesized SEQ ID NO:3 were given to 30 healthy males and postmenopausal females. At each dose level (100 μg was done twice) SEQ ID NO:3 or placebo (vehicle) was administered orally in 5.0 mL 50 mM phosphate buffer (pH 6.0) plus 3×20 mL water rinses and 175 mL water after at least a 10-hour fast. In each dosing group, subjects were randomized to receive either placebo (1 subject) or SEQ ID NO:3 (3-4 subjects). Bowel habits (including Bristol Stool Form Scale score (BSFS; FIG. 14a), stool frequency, and stool weight) were evaluated for each collected bowel movement 48 hours prior to dose and up to approximately 48 hours postdose.

[0394] Administration of a single dose of SEQ ID NO:3 resulted in an increase in maximum BSFS score (FIG. 14b). Higher BSFS post-dose scores correlated with a higher dose of the SEQ ID NO:3. FIG. 14c shows the percent of subjects with at least a 2-point increase in BSFS consistency score (mean pre-dose compared to peak 48 hours post-dose). The highest percent of subjects with a 2-point or greater increase in BSFS score are found in the 1000 μg dose group.

### Example 9

### SEQ ID NO:3 Alters the Consistency of Bowel Movements in Humans after a Seven-Day Dosing Period

[0395] Seven daily doses of 30, 100, 300, or 1000 μg of chemically synthesized SEQ ID NO:3 were given to 48 healthy subjects. SEQ ID NO:3 or placebo (vehicle) was administered orally in 5.0 mL 50 mM phosphate buffer (pH 6.0) plus 3×20 mL water rinses and 175 mL water after at least a 10-hour fast. In each dosing group, 8 subjects were randomized to receive SEQ ID NO:3 and 4 subjects were randomized to receive placebo. FIG. 15a shows the daily mean BSFS scores for the different dosing groups the seven days prior to and the seven days during dosing with SEQ ID NO:3. FIG. 15b shows the Mean Stool Frequency (stools per week) for the subjects over the seven-day treatment period. An increase in Mean Stool Frequency score was observed with higher doses of SEQ ID NO:3. FIG. 15C shows the Mean Stool Weight (in grams) of the subjects' stools over the seven-day SEQ ID NO:3 dosing period. An increase in Mean Stool Weight was observed with higher doses of SEQ ID NO:3. The Mean Ease of Passage (FIG. 15d) of stools was tested for subjects treated with 30-1000 μg SEQ ID NO:3. In FIG. 15e, the 1000 μg dose group shows the greatest difference in baseline versus treatment values between placebo and SEQ ID NO:3 for Mean Ease of Passage of stools.

### Example 10

### SEQ ID NO:3 Effects in a Rat Model of Postoperative Ileus

[0396] Female CD rats were used to test the effect of SEQ ID NO:3 on delayed transit induced by abdominal surgery and manual manipulation of the small intestine. Groups of at least nine rats underwent abdominal surgery under isoflurane anesthesia. Surgery consisted of laparotomy and 5 minutes of gentle manual intestinal massage. Following recovery from anesthesia, rats were dosed orally with either 10 μg/kg SEQ ID NO:3 or vehicle (20 mM Tris) in a volume of 300 μl. 1 hour after dosing, intestinal transit rate was measured. Animals were again dosed with 300 μl of the test article followed immediately by 500 μl of a charcoal meal (10% charcoal, 10% gum arabic in water). To calculate the distance of the small intestine traveled by the charcoal front, after 20 minutes, the total length of the intestine as well as the distance traveled from the stomach to the charcoal front were measured for each animal. Animals dosed with 10 μg/kg SEQ ID NO:3 experienced an increase in transit following abdominal surgery compared to animals dosed with vehicle alone (FIG. 16). Charcoal transit in SEQ ID NO:3 dosed animals was measured at 37.3+3.0% (mean+SEM) of the small intestine compared with vehicle at 24.7+1.4% (mean+SEM) of the small intestine.

### Example 11

### SEQ ID NO:3 Effect on cGMP Levels and Secretion in Ligated Loops Rodent Models

[0397] The effect of SEQ ID NO:3 on cGMP levels and secretion were studied by injecting SEQ ID NO:3 directly into an isolated loop in either wild-type or GC-C KO mice. This was done by surgically ligating a loop in the small intestine of the mouse. The methodology for ligated loop formation was a similar to that described in London et al. 1997 Am J Physiol p. G93-105. The loop was roughly centered and was a length of 1-3 cm. The loops were injected with 100 μl of either SEQ ID NO:3 (5 μg) or vehicle (20 mM Tris, pH 7.5 or Krebs Ringer, 10 mM Glucose, HEPES buffer (KRGH)). Following a recovery time of 90 minutes the loops were excised. Weights were recorded for each loop before and after removal of the fluid contained therein. The length of each loop was also recorded. A weight to length ratio (W/L) for each loop was calculated to determine the effects of SEQ ID NO:3 on secretion.

[0398] To determine the effect of SEQ ID NO:3 on cGMP activity, fluid from the loop was collected in ice-cold trichloracetic acid (TCA) and stored at −80° C. for use in an assay to measure cGMP levels in the fluid. Intestinal fluid samples were TCA extracted, and cyclic GMP was measured by EIA according to procedures outlined in the Cayman Chemical Cyclic GMP EIA kit (Cayman Chemical, Ann Arbor, Mich.) to determine cyclic GMP levels in the intestinal fluid of the mouse in the presence of either SEQ ID NO:3 or vehicle. FIG. 17a depicts the effects of SEQ ID NO:3 in wild-type and GC-C KO mice ligated loops with regards to cGMP activity and secretion (n=5-7 animal/group for secretion assays; n=4-7 animals/group for cGMP assays). In contrast to wild-type mice, SEQ ID NO:3 has no effect on cGMP activity or secretion in GC-C KO mice.

[0399] The effects of SEQ ID NO:3 on cGMP levels and secretion in ligated loops in female CD rats was also determined using protocols similar to those described above. In the case of the rat, however four loops of intestine were surgically ligated. The first three loops were distributed equally in the small intestine and the fourth loop was located in colon. Loops were 1 to 3 centimeters, and were injected with 200 μL of either SEQ ID NO:3 (5 μg) or vehicle (Krebs Ringer, 10 mM glucose, HEPES buffer (KRGH)). SEQ ID NO:3 increases cGMP levels and secretion in the center loop of the rat small intestine as shown in FIG. 17b (n=9-10 animal per group for secretion assays; n=7-8 animals for cGMP assays).

### Effect on Diuresis and Natriuresis

[0400] The effect of peptides/GC-agonists of the invention on diuresis and natriuresis can be determined using methodology similar to that described in WO06/001931 (examples 6 and 8, page 42, 45). Briefly, the peptide/agonist of the invention (180-pmol) is infused for 60 min into a group of 5 anesthetized rats. Given an estimated rat plasma volume of 10 mL, the infusion rate is approximately 3 pmol/mL/min. Blood pressure, urine production, and sodium excretion are monitored for approximately 40 minutes prior to the infusion, during the infusion, and for approximately 50 minutes after the infusion to measure the effect of the peptide/GC-C agonist on diuresis and natriuresis. For comparison, a control group of five rats is infused with regular saline. Urine and sodium excretion can be assessed. Dose response can also be determined. Peptide/GC-C agonist of the invention is infused intravenously into rats over 60 minutes. Urine is collected at 30 minute intervals up to 180 minutes after termination of peptide/GC-C agonist infusion, and urine volume, sodium excretion, and potassium excretion are determined for each collection interval. Blood pressure is monitored continuously. For each dose a dose-response relationship for urine volume, sodium and potassium excretion is be determined. Plasma concentration of the peptide/GC-agonist is also determined before and after iv infusion.

[0401] Diuresis Experiment:

[0402] Female Sprague-Dawley rats (>170 g, 2-8 per group) are given 3.0 mL of iosotonic saline perorally, and then anesthetized with isoflurane/oxygen. Once an appropriate level of anesthesia has been achieved, a sterile polyurethane catheter (˜16 cm, 0.6 mm ID, 0.9 mm OD) is inserted 1.5-2.0 cm into the urethra and secured using 1-2 drops of veterinary bond adhesive applied to urethra/catheter junction. Rats are then dosed with either vehicle or test article via the intravenous or intraperitoneal route. Rats are then placed in appropriately sized rat restraint tubes, with the catheter protruding out of the restraint tube into a 10 mL graduated cylinder. Rats are allowed to regain consciousness, and the volume of urine excreted over a 1-5 hour duration is recorded periodically for each rat.

### Administration of Peptides and GC-C Receptor Agonists

[0403] For treatment of gastrointestinal disorders, the peptides and agonists of the invention are preferably administered orally, e.g., as a tablet or cachet containing a predetermined amount of the active ingredient, pellet, gel, paste, syrup, bolus, electuary, slurry, sachet; capsule; powder; lyophilized powder; granules; as a solution or a suspension in an aqueous liquid or a non-aqueous liquid; as an oil-in-water liquid emulsion or a water-in-oil liquid emulsion, via a liposomal formulation (see, e.g., EP 736299) or in some other form. Orally administered compositions can include binders, lubricants, inert diluents, lubricating, surface active or dispersing agents, flavoring agents, and humectants. Orally administered formulations such as tablets may optionally be coated or scored and may be formulated so as to provide sustained, delayed or controlled release of the active ingredient therein. The peptides and agonists can be co-administered with other agents used to treat gastrointestinal disorders including but not limited to the agents described herein. The peptides and agonists can also be administered by rectal suppository. For the treatment of disorders outside the gastrointestinal tract such as congestive heart failure and benign prostatic hypertrophy, peptides and agonists are preferably administered parenterally or orally.

[0404] The peptides described herein can be administered alone or in combination with other agents. For example, the peptides can be administered together with an analgesic peptide or compound. The analgesic peptide or compound can be covalently attached to a peptide described herein or it can be a separate agent that is administered together with or sequentially with a peptide described herein in a combination therapy.

[0405] Combination therapy can be achieved by administering two or more agents, e.g., a peptide described herein and an analgesic peptide or compound, each of which is formulated and administered separately, or by administering two or more agents in a single formulation. Other combinations are also encompassed by combination therapy. For example, two agents can be formulated together and administered in conjunction with a separate formulation containing a third agent. While the two or more agents in the combination therapy can be administered simultaneously, they need not be.

[0406] For example, administration of a first agent (or combination of agents) can precede administration of a second agent (or combination of agents) by minutes, hours, days, or weeks. Thus, the two or more agents can be administered within minutes of each other or within 1, 2, 3, 6, 9, 12, 15, 18, or 24 hours of each other or within 1, 2, 3, 4, 5, 6, 7, 8, 9, 10, 12, 14 days of each other or within 2, 3, 4, 5, 6, 7, 8, 9, or 10 weeks of each other. In some cases even longer intervals are possible. While in many cases it is desirable that the two or more agents used in a combination therapy be present in within the patient's body at the same time, this need not be so.

[0407] Combination therapy can also include two or more administrations of one or more of the agents used in the combination. For example, if agent X and agent Y are used in a combination, one could administer them sequentially in any combination one or more times, e.g., in the order X-Y-X, X-X-Y, Y-X-Y, Y-Y-X, X-X-Y-Y, etc.

[0408] Combination therapy can also include the administration of two or more agents via different routes or locations. For example, (a) one agent is administered orally and another agents is administered intravenously or (b) one agent is administered orally and another is administered locally. In each case, the agents can either simultaneously or sequentially. Approximated dosages for some of the combination therapy agents described herein are found in the “BNF Recommended Dose” column of tables on pages 11-17 of WO01/76632 (the data in the tables being attributed to the March 2000 British National Formulary) and can also be found in other standard formularies and other drug prescribing directories. For some drugs, the customary prescribed dose for an indication will vary somewhat from country to country.

[0409] The agents, alone or in combination, can be combined with any pharmaceutically acceptable carrier or medium. Thus, they can be combined with materials that do not produce an adverse, allergic or otherwise unwanted reaction when administered to a patient. The carriers or mediums used can include solvents, dispersants, coatings, absorption promoting agents, controlled release agents, and one or more inert excipients (which include starches, polyols, granulating agents, microcrystalline cellulose (e.g. celphere, Celphere Beads®), diluents, lubricants, binders, disintegrating agents, and the like), etc. If desired, tablet dosages of the disclosed compositions may be coated by standard aqueous or nonaqueous techniques.

[0410] Compositions of the present invention may also optionally include other therapeutic ingredients, anti-caking agents, preservatives, sweetening agents, colorants, flavors, desiccants, plasticizers, dyes, glidants, anti-adherents, anti-static agents, surfactants (wetting agents), anti-oxidants, film-coating agents, and the like. Any such optional ingredient must be compatible with the compound of the invention to insure the stability of the formulation. The composition may contain other additives as needed, including for example lactose, glucose, fructose, galactose, trehalose, sucrose, maltose, raffinose, maltitol, melezitose, stachyose, lactitol, palatinite, starch, xylitol, mannitol, myoinositol, and the like, and hydrates thereof, and amino acids, for example alanine, glycine and betaine, and peptides and proteins, for example albumen.

[0411] Examples of excipients for use as the pharmaceutically acceptable carriers and the pharmaceutically acceptable inert carriers and the aforementioned additional ingredients include, but are not limited to binders, fillers, disintegrants, lubricants, anti-microbial agents, and coating agents such as:

[0412] BINDERS: corn starch, potato starch, other starches, gelatin, natural and synthetic gums such as acacia, xanthan, sodium alginate, alginic acid, other alginates, powdered tragacanth, guar gum, cellulose and its derivatives (e.g., ethyl cellulose, cellulose acetate, carboxymethyl cellulose calcium, sodium carboxymethyl cellulose), polyvinyl pyrrolidone (e.g., povidone, crospovidone, copovidone, etc), methyl cellulose, Methocel, pre-gelatinized starch (e.g., STARCH 1500® and STARCH 1500 LM®, sold by Colorcon, Ltd.), hydroxypropyl methyl cellulose, microcrystalline cellulose (e.g. AVICEL™, such as, AVICEL-PH-101™, -103™ and -105™, sold by FMC Corporation, Marcus Hook, Pa., USA), or mixtures thereof,

[0413] FILLERS: talc, calcium carbonate (e.g., granules or powder), dibasic calcium phosphate, tribasic calcium phosphate, calcium sulfate (e.g., granules or powder), microcrystalline cellulose, powdered cellulose, dextrates, kaolin, mannitol, silicic acid, sorbitol, starch, pre-gelatinized starch, dextrose, fructose, honey, lactose anhydrate, lactose monohydrate, lactose and aspartame, lactose and cellulose, lactose and microcrystalline cellulose, maltodextrin, maltose, mannitol, microcrystalline cellulose & guar gum, molasses, sucrose, or mixtures thereof,

[0414] DISINTEGRANTS: agar-agar, alginic acid, calcium carbonate, microcrystalline cellulose, croscarmellose sodium, crospovidone, polacrilin potassium, sodium starch glycolate, potato or tapioca starch, other starches, pre-gelatinized starch, clays, other algins, other celluloses, gums (like gellan), low-substituted hydroxypropyl cellulose, or mixtures thereof,

[0415] LUBRICANTS: calcium stearate, magnesium stearate, mineral oil, light mineral oil, glycerin, sorbitol, mannitol, polyethylene glycol, other glycols, stearic acid, sodium lauryl sulfate, sodium stearyl fumarate, vegetable based fatty acids lubricant, talc, hydrogenated vegetable oil (e.g., peanut oil, cottonseed oil, sunflower oil, sesame oil, olive oil, corn oil and soybean oil), zinc stearate, ethyl oleate, ethyl laurate, agar, syloid silica gel (AEROSIL 200, W.R. Grace Co., Baltimore, Md. USA), a coagulated aerosol of synthetic silica (Deaussa Co., Plano, Tex. USA), a pyrogenic silicon dioxide (CAB-O-SIL, Cabot Co., Boston, Mass. USA), or mixtures thereof,

[0416] ANTI-CAKING AGENTS: calcium silicate, magnesium silicate, silicon dioxide, colloidal silicon dioxide, talc, or mixtures thereof,

[0417] ANTIMICROBIAL AGENTS: benzalkonium chloride, benzethonium chloride, benzoic acid, benzyl alcohol, butyl paraben, cetylpyridinium chloride, cresol, chlorobutanol, dehydroacetic acid, ethylparaben, methylparaben, phenol, phenylethyl alcohol, phenoxyethanol, phenylmercuric acetate, phenylmercuric nitrate, potassium sorbate, propylparaben, sodium benzoate, sodium dehydroacetate, sodium propionate, sorbic acid, thimersol, thymo, or mixtures thereof, and

[0418] COATING AGENTS: sodium carboxymethyl cellulose, cellulose acetate phthalate, ethylcellulose, gelatin, pharmaceutical glaze, hydroxypropyl cellulose, hydroxypropyl methylcellulose (hypromellose), hydroxypropyl methyl cellulose phthalate, methylcellulose, polyethylene glycol, polyvinyl acetate phthalate, shellac, sucrose, titanium dioxide, carnauba wax, microcrystalline wax, gellan gum, maltodextrin, methacrylates, microcrystalline cellulose and carrageenan or mixtures thereof.

[0419] The formulation can also include other excipients and categories thereof including but not limited to L-histidine, Pluronic®, Poloxamers (such as Lutrol® and Poloxamer 188), ascorbic acid, glutathione, permeability enhancers (e.g. lipids, sodium cholate, acylcamitine, salicylates, mixed bile salts, fatty acid micelles, chelators, fatty acid, surfactants, medium chain glycerides), protease inhibitors (e.g. soybean trypsin inhibitor, organic acids), pH lowering agents and absorption enhancers effective to promote bioavailability (including but not limited to those described in U.S. Pat. No. 6,086,918 and U.S. Pat. No. 5,912,014), creams and lotions (like maltodextrin and carrageenans); materials for chewable tablets (like dextrose, fructose, lactose monohydrate, lactose and aspartame, lactose and cellulose, maltodextrin, maltose, mannitol, microcrystalline cellulose and guar gum, sorbitol crystalline); parenterals (like mannitol and povidone); plasticizers (like dibutyl sebacate, plasticizers for coatings, polyvinylacetate phthalate); powder lubricants (like glyceryl behenate); soft gelatin capsules (like sorbitol special solution); spheres for coating (like sugar spheres); spheronization agents (like glyceryl behenate and microcrystalline cellulose); suspending/gelling agents (like carrageenan, gellan gum, mannitol, microcrystalline cellulose, povidone, sodium starch glycolate, xanthan gum); sweeteners (like aspartame, aspartame and lactose, dextrose, fructose, honey, maltodextrin, maltose, mannitol, molasses, sorbitol crystalline, sorbitol special solution, sucrose); wet granulation agents (like calcium carbonate, lactose anhydrous, lactose monohydrate, maltodextrin, mannitol, microcrystalline cellulose, povidone, starch), caramel, carboxymethylcellulose sodium, cherry cream flavor and cherry flavor, citric acid anhydrous, citric acid, confectioner's sugar, D&C Red No. 33, D&C Yellow #10 Aluminum Lake, disodium edetate, ethyl alcohol 15%, FD& C Yellow No. 6 aluminum lake, FD&C Blue #1 Aluminum Lake, FD&C Blue No. 1, FD&C blue no. 2 aluminum lake, FD&C Green No. 3, FD&C Red No. 40, FD&C Yellow No. 6 Aluminum Lake, FD&C Yellow No. 6, FD&C Yellow No. 10, glycerol palmitostearate, glyceryl monostearate, indigo carmine, lecithin, manitol, methyl and propyl parabens, mono ammonium glycyrrhizinate, natural and artificial orange flavor, pharmaceutical glaze, poloxamer 188, Polydextrose, polysorbate 20, polysorbate 80, polyvidone, pregelatinized corn starch, pregelatinized starch, red iron oxide, saccharin sodium, sodium carboxymethyl ether, sodium chloride, sodium citrate, sodium phosphate, strawberry flavor, synthetic black iron oxide, synthetic red iron oxide, titanium dioxide, and white wax.

[0420] Solid oral dosage forms may optionally be treated with coating systems (e.g. Opadry® fx film coating system, for example Opadry® blue (OY-LS-20921), Opadry® white (YS-2-7063), Opadry® white (YS-1-7040), and black ink (S-1-8106).

[0421] The agents either in their free form or as a salt can be combined with a polymer such as polylactic-glycoloic acid (PLGA), poly-(I)-lactic-glycolic-tartaric acid (P(I)LGT) (WO 01/12233), polyglycolic acid (U.S. Pat. No. 3,773,919), polylactic acid (U.S. Pat. No. 4,767,628), poly(s-caprolactone) and poly(alkylene oxide) (U.S. 20030068384) to create a sustained release formulation. Such formulations can be used to implants that release a peptide or another agent over a period of a few days, a few weeks or several months depending on the polymer, the particle size of the polymer, and the size of the implant (see, e.g., U.S. Pat. No. 6,620,422). Other sustained release formulations and polymers for use in are described in EP 0 467 389 A2, WO 93/24150, U.S. Pat. No. 5,612,052, WO 97/40085, WO 03/075887, WO 01/01964A2, U.S. Pat. No. 5,922,356, WO 94/155587, WO 02/074247A2, WO 98/25642, U.S. Pat. No. 5,968,895, U.S. Pat. No. 6,180,608, U.S. 20030171296, U.S. 20020176841, U.S. Pat. No. 5,672,659, U.S. Pat. No. 5,893,985, U.S. Pat. No. 5,134,122, U.S. Pat. No. 5,192,741, U.S. Pat. No. 5,192,741, U.S. Pat. No. 4,668,506, U.S. Pat. No. 4,713,244, U.S. Pat. No. 5,445,832 U.S. Pat. No. 4,931,279, U.S. Pat. No. 5,980,945, WO 02/058672, WO 9726015, WO 97/04744, and US20020019446. In such sustained release formulations microparticles (Delie and Blanco-Prieto 2005 Molecule 10:65-80) of peptide are combined with microparticles of polymer. One or more sustained release implants can be placed in the large intestine, the small intestine or both. U.S. Pat. No. 6,011,011 and WO 94/06452 describe a sustained release formulation providing either polyethylene glycols (i.e. PEG 300 and PEG 400) or triacetin. WO 03/053401 describes a formulation which may both enhance bioavailability and provide controlled release of the agent within the GI tract. Additional controlled release formulations are described in WO 02/38129, EP 326 151, U.S. Pat. No. 5,236,704, WO 02/30398, WO 98/13029; U.S. 20030064105, U.S. 20030138488A1, U.S. 20030216307A1, U.S. Pat. No. 6,667,060, WO 01/49249, WO 01/49311, WO 01/49249, WO 01/49311, and U.S. Pat. No. 5,877,224.

[0422] The agents can be administered, e.g., by intravenous injection, intramuscular injection, subcutaneous injection, intraperitoneal injection, topical, sublingual, intraarticular (in the joints), intradermal, buccal, ophthalmic (including intraocular), intranasaly (including using a cannula), intraspinally, intrathecally, or by other routes. The agents can be administered orally, e.g., as a tablet or cachet containing a predetermined amount of the active ingredient, gel, pellet, paste, syrup, bolus, electuary, slurry, capsule, powder, lyophilized powder, granules, sachet, as a solution or a suspension in an aqueous liquid or a non-aqueous liquid, as an oil-in-water liquid emulsion or a water-in-oil liquid emulsion, via a micellar formulation (see, e.g. WO 97/11682) via a liposomal formulation (see, e.g., EP 736299, WO 99/59550 and WO 97/13500), via formulations described in WO 03/094886, via bilosome (bile-salt based vesicular system), via a dendrimer, or in some other form. Orally administered compositions can include binders, lubricants, inert diluents, lubricating, surface active or dispersing agents, flavoring agents, and humectants. Orally administered formulations such as tablets may optionally be coated or scored and may be formulated so as to provide sustained, delayed or controlled release of the active ingredient therein. The agents can also be administered transdermally (i.e. via reservoir-type or matrix-type patches, microneedles, thermal poration, hypodermic needles, iontophoresis, electroporation, ultrasound or other forms of sonophoresis, jet injection, or a combination of any of the preceding methods (Prausnitz et al. 2004, Nature Reviews Drug Discovery 3:115-124)). The agents can be administered using high-velocity transdermal particle injection techniques using the hydrogel particle formulation described in U.S. 20020061336. Additional particle formulations are described in WO 00/45792, WO 00/53160, and WO 02/19989. An example of a transdermal formulation containing plaster and the absorption promoter dimethylisosorbide can be found in WO 89/04179. WO 96/11705 provides formulations suitable for transdermal administration. The agents can be administered in the form a suppository or by other vaginal or rectal means. The agents can be administered in a transmembrane formulation as described in WO 90/07923. The agents can be administered non-invasively via the dehydrated particles described in U.S. Pat. No. 6,485,706. The agent can be administered in an enteric-coated drug formulation as described in WO 02/49621. The agents can be administered intranassaly using the formulation described in U.S. Pat. No. 5,179,079. Formulations suitable for parenteral injection are described in WO 00/62759. The agents can be administered using the casein formulation described in U.S. 20030206939 and WO 00/06108. The agents can be administered using the particulate formulations described in U.S. 20020034536.

[0423] The agents, alone or in combination with other suitable components, can be administered by pulmonary route utilizing several techniques including but not limited to intratracheal instillation (delivery of solution into the lungs by syringe), intratracheal delivery of liposomes, insufflation (administration of powder formulation by syringe or any other similar device into the lungs) and aerosol inhalation. Aerosols (e.g., jet or ultrasonic nebulizers, metered-dose inhalers (MDIs), and dry-powder inhalers (DPIs)) can also be used in intranasal applications. Aerosol formulations are stable dispersions or suspensions of solid material and liquid droplets in a gaseous medium and can be placed into pressurized acceptable propellants, such as hydrofluoroalkanes (HFAs, i.e. HFA-134a and HFA-227, or a mixture thereof), dichlorodifluoromethane (or other chlorofluocarbon propellants such as a mixture of Propellants 11, 12, and/or 114), propane, nitrogen, and the like. Pulmonary formulations may include permeation enhancers such as fatty acids, saccharides, chelating agents, enzyme inhibitors (e.g., protease inhibitors), adjuvants (e.g., glycocholate, surfactin, span 85, and nafamostat), preservatives (e.g., benzalkonium chloride or chlorobutanol), and ethanol (normally up to 5% but possibly up to 20%, by weight). Ethanol is commonly included in aerosol compositions as it can improve the function of the metering valve and in some cases also improve the stability of the dispersion. Pulmonary formulations may also include surfactants which include but are not limited to bile salts and those described in U.S. Pat. No. 6,524,557 and references therein. The surfactants described in U.S. Pat. No. 6,524,557, e.g., a C8-C16 fatty acid salt, a bile salt, a phospholipid, or alkyl saccharide are advantageous in that some of them also reportedly enhance absorption of the peptide in the formulation. Also suitable in the invention are dry powder formulations comprising a therapeutically effective amount of active compound blended with an appropriate carrier and adapted for use in connection with a dry-powder inhaler. Absorption enhancers which can be added to dry powder formulations of the present invention include those described in U.S. Pat. No. 6,632,456. WO 02/080884 describes new methods for the surface modification of powders. Aerosol formulations may include U.S. Pat. No. 5,230,884, U.S. Pat. No. 5,292,499, WO 017/8694, WO 01/78696, U.S. 2003019437, U.S. 20030165436, and WO 96/40089 (which includes vegetable oil). Sustained release formulations suitable for inhalation are described in U.S. 20010036481A1, 20030232019A1, and U.S. 20040018243A1 as well as in WO 01/13891, WO 02/067902, WO 03/072080, and WO 03/079885. Pulmonary formulations containing microparticles are described in WO 03/015750, U.S. 20030008013, and WO 00/00176. Pulmonary formulations containing stable glassy state powder are described in U.S. 20020141945 and U.S. Pat. No. 6,309,671. Other aerosol formulations are described in EP 1338272A1 WO 90/09781, U.S. Pat. No. 5,348,730, U.S. Pat. No. 6,436,367, WO 91/04011, and U.S. Pat. No. 6,294,153 and U.S. Pat. No. 6,290,987 describes a liposomal based formulation that can be administered via aerosol or other means. Powder formulations for inhalation are described in U.S. 20030053960 and WO 01/60341. The agents can be administered intranasally as described in U.S. 20010038824. The agents can be incorporated into microemulsions, which generally are thermodynamically stable, isotropically clear dispersions of two immiscible liquids, such as oil and water, stabilized by an interfacial film of surfactant molecules (Encyclopedia of Pharmaceutical Technology (New York: Marcel Dekker, 1992), volume 9). For the preparation of microemulsions, surfactant (emulsifier), co-surfactant (co-emulsifier), an oil phase and a water phase are necessary. Suitable surfactants include any surfactants that are useful in the preparation of emulsions, e.g., emulsifiers that are typically used in the preparation of creams. The co-surfactant (or “co-emulsifer”) is generally selected from the group of polyglycerol derivatives, glycerol derivatives and fatty alcohols. Preferred emulsifier/co-emulsifier combinations are generally although not necessarily selected from the group consisting of: glyceryl monostearate and polyoxyethylene stearate; polyethylene glycol and ethylene glycol palmitostearate; and caprilic and capric triglycerides and oleoyl macrogolglycerides. The water phase includes not only water but also, typically, buffers, glucose, propylene glycol, polyethylene glycols, preferably lower molecular weight polyethylene glycols (e.g., PEG 300 and PEG 400), and/or glycerol, and the like, while the oil phase will generally comprise, for example, fatty acid esters, modified vegetable oils, silicone oils, mixtures of mono- di- and triglycerides, mono- and di-esters of PEG (e.g., oleoyl macrogol glycerides), etc.

[0424] The agents of the invention can be incorporated into pharmaceutically-acceptable nanoparticle, nanosphere, and nanocapsule formulations (Delie and Blanco-Prieto 2005 Molecule 10:65-80). Nanocapsules can generally entrap compounds in a stable and reproducible way (Henry-Michelland et al., 1987; Quintanar-Guerrero et al., 1998; Douglas et al., 1987). To avoid side effects due to intracellular polymeric overloading, ultrafine particles (sized around 0.1 μm) can be designed using polymers able to be degraded in vivo (e.g. biodegradable polyalkyl-cyanoacrylate nanoparticles). Such particles are described in the prior art (Couvreur et al, 1980; 1988; zur Muhlen et al., 1998; Zambaux et al. 1998; Pinto-Alphandry et al., 1995 and U.S. Pat. No. 5,145,684).

[0425] The agents of the invention can be formulated with pH sensitive materials which may include those described in WO04041195 (including the seal and enteric coating described therein) and pH-sensitive coatings that achieve delivery in the colon including those described in U.S. Pat. No. 4,910,021 and WO9001329. U.S. Pat. No. 4,910,021 describes using a pH-sensitive material to coat a capsule. WO9001329 describes using pH-sensitive coatings on beads containing acid, where the acid in the bead core prolongs dissolution of the pH-sensitive coating. U.S. Pat. No. 5,175,003 discloses a dual mechanism polymer mixture composed of pH-sensitive enteric materials and film-forming plasticizers capable of conferring permeability to the enteric material, for use in drug-delivery systems; a matrix pellet composed of a dual mechanism polymer mixture permeated with a drug and sometimes covering a pharmaceutically neutral nucleus; a membrane-coated pellet comprising a matrix pellet coated with a dual mechanism polymer mixture envelope of the same or different composition; and a pharmaceutical dosage form containing matrix pellets. The matrix pellet releases acid-soluble drugs by diffusion in acid pH and by disintegration at pH levels of nominally about 5.0 or higher. The agents of the invention may be formulated in the pH triggered targeted control release systems described in WO04052339. The agents of the invention may be formulated according to the methodology described in any of WO03105812 (extruded hyrdratable polymers); WO0243767 (enzyme cleavable membrane translocators); WO03007913 and WO03086297 (mucoadhesive systems); WO02072075 (bilayer laminated formulation comprising pH lowering agent and absorption enhancer); WO04064769 (amidated peptides); WO05063156 (solid lipid suspension with pseudotropic and/or thixotropic properties upon melting); WO03035029 and WO03035041 (erodible, gastric retentive dosage forms); U.S. Pat. No. 5,007,790 and U.S. Pat. No. 5,972,389 (sustained release dosage forms); WO04112711 (oral extended release compositions); WO05027878, WO02072033, and WO02072034 (delayed release compositions with natural or synthetic gum); WO05030182 (controlled release formulations with an ascending rate of release); WO05048998 (microencapsulation system); U.S. Pat. No. 5,952,314 (biopolymer); U.S. Pat. No. 5,108,758 (glassy amylose matrix delivery); U.S. Pat. No. 5,840,860 (modified starch based delivery). JP10324642 (delivery system comprising chitosan and gastric resistant material such as wheat gliadin or zein); U.S. Pat. No. 5,866,619 and U.S. Pat. No. 6,368,629 (saccharide containing polymer); U.S. Pat. No. 6,531,152 (describes a drug delivery system containing a water soluble core (Ca pectinate or other water-insoluble polymers) and outer coat which bursts (e.g. hydrophobic polymer-Eudragrit)); U.S. Pat. No. 6,234,464; U.S. Pat. No. 6,403,130 (coating with polymer containing casein and high methoxy pectin; WO0174175 (Maillard reaction product); WO05063206 (solubility increasing formulation); WO04019872 (transferring fusion proteins). The agents of the invention may be formulated using gastrointestinal retention system technology (GIRES; Merrion Pharmaceuticals). GIRES comprises a controlled-release dosage form inside an inflatable pouch, which is placed in a drug capsule for oral administration. Upon dissolution of the capsule, a gas-generating system inflates the pouch in the stomach where it is retained for 16-24 hours, all the time releasing agents of the invention.

[0426] The agents of the invention can be formulated in an osmotic device including the ones disclosed in U.S. Pat. No. 4,503,030, U.S. Pat. No. 5,609,590 and U.S. Pat. No. 5,358,502. U.S. Pat. No. 4,503,030 discloses an osmotic device for dispensing a drug to certain pH regions of the gastrointestinal tract. More particularly, the invention relates to an osmotic device comprising a wall formed of a semi-permeable pH sensitive composition that surrounds a compartment containing a drug, with a passageway through the wall connecting the exterior of the device with the compartment. The device delivers the drug at a controlled rate in the region of the gastrointestinal tract having a pH of less than 3.5, and the device self-destructs and releases all its drug in the region of the gastrointestinal tract having a pH greater than 3.5, thereby providing total availability for drug absorption. U.S. Pat. Nos. 5,609,590 and 5,358,502 disclose an osmotic bursting device for dispensing a beneficial agent to an aqueous environment. The device comprises a beneficial agent and osmagent surrounded at least in part by a semi-permeable membrane. The beneficial agent may also function as the osmagent. The semi-permeable membrane is permeable to water and substantially impermeable to the beneficial agent and osmagent. A trigger means is attached to the semi-permeable membrane (e.g., joins two capsule halves). The trigger means is activated by a pH of from 3 to 9 and triggers the eventual, but sudden, delivery of the beneficial agent. These devices enable the pH-triggered release of the beneficial agent core as a bolus by osmotic bursting.

[0427] The agents of the invention may be formulated based on the invention described in U.S. Pat. No. 5,316,774 which discloses a composition for the controlled release of an active substance comprising a polymeric particle matrix, where each particle defines a network of internal pores. The active substance is entrapped within the pore network together with a blocking agent having physical and chemical characteristics selected to modify the release rate of the active substance from the internal pore network. In one embodiment, drugs may be selectively delivered to the intestines using an enteric material as the blocking agent. The enteric material remains intact in the stomach but degrades under the pH conditions of the intestines. In another embodiment, the sustained release formulation employs a blocking agent, which remains stable under the expected conditions of the environment to which the active substance is to be released. The use of pH-sensitive materials alone to achieve site-specific delivery is difficult because of leaking of the beneficial agent prior to the release site or desired delivery time and it is difficult to achieve long time lags before release of the active ingredient after exposure to high pH (because of rapid dissolution or degradation of the pH-sensitive materials).

[0428] The agents may also be formulated in a hybrid system which combines pH-sensitive materials and osmotic delivery systems. These hybrid devices provide delayed initiation of sustained-release of the beneficial agent. In one device a pH-sensitive matrix or coating dissolves releasing osmotic devices that provide sustained release of the beneficial agent see U.S. Pat. Nos. 4,578,075, 4,681,583, and 4,851,231. A second device consists of a semipermeable coating made of a polymer blend of an insoluble and a pH-sensitive material. As the pH increases, the permeability of the coating increases, increasing the rate of release of beneficial agent see U.S. Pat. Nos. 4,096,238, 4,503,030, 4,522,625, and 4,587,117.

[0429] The agents of the invention may be formulated in terpolymers according to U.S. Pat. No. 5,484,610 which discloses terpolymers which are sensitive to pH and temperature which are useful carriers for conducting bioactive agents through the gastric juices of the stomach in a protected form. The terpolymers swell at the higher physiologic pH of the intestinal tract causing release of the bioactive agents into the intestine. The terpolymers are linear and are made up of 35 to 99 wt % of a temperature sensitive component, which imparts to the terpolymer LCST (lower critical solution temperature) properties below body temperatures, 1 to 30 wt % of a pH sensitive component having a pKa in the range of from 2 to 8 which functions through ionization or deionization of carboxylic acid groups to prevent the bioactive agent from being lost at low pH but allows bioactive agent release at physiological pH of about 7.4 and a hydrophobic component which stabilizes the LCST below body temperatures and compensates for bioactive agent effects on the terpolymers. The terpolymers provide for safe bioactive agent loading, a simple procedure for dosage form fabrication and the terpolymer functions as a protective carrier in the acidic environment of the stomach and also protects the bioactive agents from digestive enzymes until the bioactive agent is released in the intestinal tract.

[0430] The agents of the invention may be formulated in pH sensitive polymers according to those described in U.S. Pat. No. 6,103,865. U.S. Pat. No. 6,103,865 discloses pH-sensitive polymers containing sulfonamide groups, which can be changed in physical properties, such as swellability and solubility, depending on pH and which can be applied for a drug-delivery system, bio-material, sensor, and the like, and a preparation method therefore. The pH-sensitive polymers are prepared by introduction of sulfonamide groups, various in pKa, to hydrophilic groups of polymers either through coupling to the hydrophilic groups of polymers, such as acrylamide, N,N-dimethylacrylamide, acrylic acid, N-isopropylacrylamide and the like or copolymerization with other polymerizable monomers. These pH-sensitive polymers may have a structure of linear polymer, grafted copolymer, hydrogel or interpenetrating network polymer.

[0431] The agents of the invention may be formulated according U.S. Pat. No. 5,656,292 which discloses a composition for pH dependent or pH regulated controlled release of active ingredients especially drugs. The composition consists of a compactable mixture of the active ingredient and starch molecules substituted with acetate and dicarboxylate residues. The preferred dicarboxylate acid is succinate. The average substitution degree of the acetate residue is at least 1 and 0.2-1.2 for the dicarboxylate residue. The starch molecules can have the acetate and dicarboxylate residues attached to the same starch molecule backbone or attached to separate starch molecule backbones. The present invention also discloses methods for preparing said starch acetate dicarboxylates by transesterification or mixing of starch acetates and starch dicarboxylates respectively.

[0432] The agents of the invention may be formulated according to the methods described in U.S. Pat. Nos. 5,554,147, 5,788,687, and 6,306,422 which disclose a method for the controlled release of a biologically active agent wherein the agent is released from a hydrophobic, pH-sensitive polymer matrix. The polymer matrix swells when the environment reaches pH 8.5, releasing the active agent. A polymer of hydrophobic and weakly acidic comonomers is disclosed for use in the controlled release system. Also disclosed is a specific embodiment in which the controlled release system may be used. The pH-sensitive polymer is coated onto a latex catheter used in ureteral catheterization. A ureteral catheter coated with a pH-sensitive polymer having an antibiotic or urease inhibitor trapped within its matrix will release the active agent when exposed to high pH urine.

[0433] The agents of the invention may be formulated in/with bioadhesive polymers according to U.S. Pat. No. 6,365,187. Bioadhesive polymers in the form of, or as a coating on, microcapsules containing drugs or bioactive substances which may serve for therapeutic, or diagnostic purposes in diseases of the gastrointestinal tract, are described in U.S. Pat. No. 6,365,187. The polymeric microspheres all have a bioadhesive force of at least 11 mN/cm² (110 N/m2) Techniques for the fabrication of bioadhesive microspheres, as well as a method for measuring bioadhesive forces between microspheres and selected segments of the gastrointestinal tract in vitro are also described. This quantitative method provides a means to establish a correlation between the chemical nature, the surface morphology and the dimensions of drug-loaded microspheres on one hand and bioadhesive forces on the other, allowing the screening of the most promising materials from a relatively large group of natural and synthetic polymers which, from theoretical consideration, should be used for making bioadhesive microspheres. Solutions of medicament in buffered saline and similar vehicles are commonly employed to generate an aerosol in a nebulizer. Simple nebulizers operate on Bernoulli's principle and employ a stream of air or oxygen to generate the spray particles. More complex nebulizers employ ultrasound to create the spray particles. Both types are well known in the art and are described in standard textbooks of pharmacy such as Sprowls' American Pharmacy and Remington's The Science and Practice of Pharmacy. Other devices for generating aerosols employ compressed gases, usually hydrofluorocarbons and chlorofluorocarbons, which are mixed with the medicament and any necessary excipients in a pressurized container, these devices are likewise described in standard textbooks such as Sprowls and Remington.

[0434] The agents can be a free acid or base, or a pharmacologically acceptable salt thereof. Solids can be dissolved or dispersed immediately prior to administration or earlier. In some circumstances the preparations include a preservative to prevent the growth of microorganisms. The pharmaceutical forms suitable for injection can include sterile aqueous or organic solutions or dispersions which include, e.g., water, an alcohol, an organic solvent, an oil or other solvent or dispersant (e.g., glycerol, propylene glycol, polyethylene glycol, and vegetable oils). The formulations may contain antioxidants, buffers, bacteriostats, and solutes that render the formulation isotonic with the blood of the intended recipient, and aqueous and non-aqueous sterile suspensions that can include suspending agents, solubilizers, thickening agents, stabilizers, and preservatives. Pharmaceutical agents can be sterilized by filter sterilization or by other suitable means. The agent can be fused to immunoglobulins or albumin, albumin variants or fragments thereof, or incorporated into a liposome to improve half-life. Thus the peptides described herein may be fused directly or via a peptide linker, water soluble polymer, or prodrug linker to albumin or an analog, fragment, or derivative thereof. Generally, the albumin proteins that are part of the fusion proteins of the present invention may be derived from albumin cloned from any species, including human. Human serum albumin (HSA) consists of a single non-glycosylated polypeptide chain of 585 amino acids with a formula molecular weight of 66,500. The amino acid sequence of human HSA is known [See Meloun, et al. (1975) FEBS Letters 58:136; Behrens, et al. (1975) Fed. Proc. 34:591; Lawn, et al. (1981) Nucleic Acids Research 9:6102-6114; Minghetti, et al. (1986) J. Biol. Chem. 261:6747, each of which are incorporated by reference herein]. A variety of polymorphic variants as well as analogs and fragments of albumin have been described. [See Weitkamp, et al., (1973) Ann. Hum. Genet. 37:219]. For example, in EP 322,094, various shorter forms of HSA. Some of these fragments of HSA are disclosed, including HSA(1-373), HSA(1-388), HSA(1-389), HSA(1-369), and HSA(1-419) and fragments between 1-369 and 1-419. EP 399,666 discloses albumin fragments that include HSA(1-177) and HSA(1-200) and fragments between HSA(1-177) and HSA(1-200). Methods related to albumin fusion proteins can be found in U.S. Pat. No. 7,056,701, U.S. Pat. No. 6,994,857, U.S. Pat. No. 6,946,134, U.S. Pat. No. 6,926,898, and U.S. Pat. No. 6,905,688 and the related priority documents and references cited therein. The agent can also be conjugated to polyethylene glycol (PEG) chains. Methods for pegylation and additional formulations containing PEG-conjugates (i.e. PEG-based hydrogels, PEG modified liposomes) can be found in Harris and Chess, Nature Reviews Drug Discovery 2: 214-221 and the references therein. Peptides can also be modified with alkyl groups (e.g., C1-C20 straight or branched alkyl groups); fatty acid radicals; and combinations of PEG, alkyl groups and fatty acid radicals (see U.S. Pat. No. 6,309,633; Soltero et al., 2001 Innovations in Pharmaceutical Technology 106-110). The agent can be administered via a nanocochleate or cochleate delivery vehicle (BioDelivery Sciences International). The agents can be delivered transmucosally (i.e. across a mucosal surface such as the vagina, eye or nose) using formulations such as that described in U.S. Pat. No. 5,204,108. The agents can be formulated in microcapsules as described in WO 88/01165. The agent can be administered intra-orally using the formulations described in U.S. 20020055496, WO 00/47203, and U.S. Pat. No. 6,495,120. The agent can be delivered using nanoemulsion formulations described in WO 01/91728A2.

[0435] The agents can be administered using COLAL® colonic drug delivery technology (U.S. Pat. No. 6,534,549) BTGInternational, Ltd.; Alizyme, plc; Cambridge, UK) in which small pellets containing the agents are coated with ethylcellulose and a specific form of amylose. This coating prevents drug release in the stomach and small intestine. When the pellets reach the colon the amylose in the coating is broken down by bacterial enzymes and the agent is released.

### Controlled Release Formulations

[0436] In general, one can provide for controlled release of the agents described herein through the use of a wide variety of polymeric carriers and controlled release systems including erodible and non-erodible matrices, osmotic control devices, various reservoir devices, enteric coatings and multiparticulate control devices.

[0437] Matrix devices are a common device for controlling the release of various agents. In such devices, the agents described herein are generally present as a dispersion within the polymer matrix, and are typically formed by the compression of a polymer/drug mixture or by dissolution or melting. The dosage release properties of these devices may be dependent upon the solubility of the agent in the polymer matrix or, in the case of porous matrices, the solubility in the sink solution within the pore network, and the tortuosity of the network. In one instance, when utilizing an erodible polymeric matrix, the matrix imbibes water and forms an aqueous-swollen gel that entraps the agent. The matrix then gradually erodes, swells, disintegrates or dissolves in the GI tract, thereby controlling release of one or more of the agents described herein. In non-erodible devices, the agent is released by diffusion through an inert matrix.

[0438] Agents described herein can be incorporated into an erodible or non-erodible polymeric matrix controlled release device. By an erodible matrix is meant aqueous-erodible or water-swellable or aqueous-soluble in the sense of being either erodible or swellable or dissolvable in pure water or requiring the presence of an acid or base to ionize the polymeric matrix sufficiently to cause erosion or dissolution. When contacted with the aqueous environment of use, the erodible polymeric matrix imbibes water and forms an aqueous-swollen gel or matrix that entraps the agent described herein. The aqueous-swollen matrix gradually erodes, swells, disintegrates or dissolves in the environment of use, thereby controlling the release of a compound described herein to the environment of use.

[0439] The erodible polymeric matrix into which an agent described herein can be incorporated may generally be described as a set of excipients that are mixed with the agent following its formation that, when contacted with the aqueous environment of use imbibes water and forms a water-swollen gel or matrix that entraps the drug form. Drug release may occur by a variety of mechanisms, for example, the matrix may disintegrate or dissolve from around particles or granules of the agent or the agent may dissolve in the imbibed aqueous solution and diffuse from the tablet, beads or granules of the device. One ingredient of this water-swollen matrix is the water-swellable, erodible, or soluble polymer, which may generally be described as an osmopolymer, hydrogel or water-swellable polymer. Such polymers may be linear, branched, or crosslinked. The polymers may be homopolymers or copolymers. In certain embodiments, they may be synthetic polymers derived from vinyl, acrylate, methacrylate, urethane, ester and oxide monomers. In other embodiments, they can be derivatives of naturally occurring polymers such as polysaccharides (e.g. chitin, chitosan, dextran and pullulan; gum agar, gum arabic, gum karaya, locust bean gum, gum tragacanth, carrageenans, gum ghatti, guar gum, xanthan gum and scleroglucan), starches (e.g. dextrin and maltodextrin), hydrophilic colloids (e.g. pectin), phosphatides (e.g. lecithin), alginates (e.g. ammonium alginate, sodium, potassium or calcium alginate, propylene glycol alginate), gelatin, collagen, and cellulosics. Cellulosics are cellulose polymer that has been modified by reaction of at least a portion of the hydroxyl groups on the saccharide repeat units with a compound to form an ester-linked or an ether-linked substituent. For example, the cellulosic ethyl cellulose has an ether linked ethyl substituent attached to the saccharide repeat unit, while the cellulosic cellulose acetate has an ester linked acetate substituent. In certain embodiments, the cellulosics for the erodible matrix comprises aqueous-soluble and aqueous-erodible cellulosics can include, for example, ethyl cellulose (EC), methylethyl cellulose (MEC), carboxymethyl cellulose (CMC), CMEC, hydroxyethyl cellulose (HEC), hydroxypropyl cellulose (HPC), cellulose acetate (CA), cellulose propionate (CP), cellulose butyrate (CB), cellulose acetate butyrate (CAB), CAP, CAT, hydroxypropyl methyl cellulose (HPMC), HPMCP, HPMCAS, hydroxypropyl methyl cellulose acetate trimellitate (HPMCAT), and ethylhydroxy ethylcellulose (EHEC). In certain embodiments, the cellulosics comprises various grades of low viscosity (MW less than or equal to 50,000 daltons, for example, the Dow Methocel™ series E5, E15LV, E50LV and K100LY) and high viscosity (MW greater than 50,000 daltons, for example, E4MCR, E10MCR, K4M, K15M and K100M and the Methocel™ K series) HPMC. Other commercially available types of HPMC include the Shin Etsu Metolose 90SH series. The choice of matrix material can have a large effect on the maximum drug concentration attained by the device as well as the maintenance of a high drug concentration. The matrix material can be a concentration-enhancing polymer, for example, as described in WO05/011634.

[0440] Other materials useful as the erodible matrix material include, but are not limited to, pullulan, polyvinyl pyrrolidone, polyvinyl alcohol, polyvinyl acetate, glycerol fatty acid esters, polyacrylamide, polyacrylic acid, copolymers of ethacrylic acid or methacrylic acid (EUDRAGITO, Rohm America, Inc., Piscataway, N.J.) and other acrylic acid derivatives such as homopolymers and copolymers of butylmethacrylate, methylmethacrylate, ethylmethacrylate, ethylacrylate, (2-dimethylaminoethyl)methacrylate, and (trimethylaminoethyl)methacrylate chloride.

[0441] The erodible matrix polymer may contain a wide variety of the same types of additives and excipients known in the pharmaceutical arts, including osmopolymers, osmagens, solubility-enhancing or -retarding agents and excipients that promote stability or processing of the device.

[0442] Alternatively, the agents of the present invention may be administered by or incorporated into a non-erodible matrix device. In such devices, an agent described herein is distributed in an inert matrix. The agent is released by diffusion through the inert matrix. Examples of materials suitable for the inert matrix include insoluble plastics (e.g. methyl acrylate-methyl methacrylate copolymers, polyvinyl chloride, polyethylene), hydrophilic polymers (e.g. ethyl cellulose, cellulose acetate, crosslinked polyvinylpyrrolidone (also known as crospovidone)), and fatty compounds (e.g. carnauba wax, microcrystalline wax, and triglycerides). Such devices are described further in Remington: The Science and Practice of Pharmacy, 20th edition (2000). Matrix controlled release devices may be prepared by blending an agent described herein and other excipients together, and then forming the blend into a tablet, caplet, pill, or other device formed by compressive forces. Such compressed devices may be formed using any of a wide variety of presses used in the fabrication of pharmaceutical devices. Examples include single-punch presses, rotary tablet presses, and multilayer rotary tablet presses, all well known in the art. See for example, Remington: The Science and Practice of Pharmacy, 20th Edition, 2000. The compressed device may be of any shape, including round, oval, oblong, cylindrical, or triangular. The upper and lower surfaces of the compressed device may be flat, round, concave, or convex.

[0443] In certain embodiments, when formed by compression, the device has a strength of at least 5 Kiloponds (Kp)/cm² (for example, at least 7 Kp/cm²). Strength is the fracture force, also known as the tablet hardness required to fracture a tablet formed from the materials, divided by the maximum cross-sectional area of the tablet normal to that force. The fracture force may be measured using a Schleuniger Tablet Hardness Tester, Model 6D. The compression force required to achieve this strength will depend on the size of the tablet, but generally will be greater than about 5 kP/cm². Friability is a well-know measure of a device's resistance to surface abrasion that measures weight loss in percentage after subjecting the device to a standardized agitation procedure. Friability values of from 0.8 to 1.0% are regarded as constituting the upper limit of acceptability. Devices having a strength of greater than 5 kP/cm² generally are very robust, having a friability of less than 0.5%. Other methods for forming matrix controlled-release devices are well known in the pharmaceutical arts. See for example, Remington: The Science and Practice of Pharmacy, 20th Edition, 2000.

[0444] As noted above, the agents described herein may also be incorporated into an osmotic control device. Such devices generally include a core containing one or more agents as described herein and a water permeable, non-dissolving and non-eroding coating surrounding the core which controls the influx of water into the core from an aqueous environment of use so as to cause drug release by extrusion of some or all of the core to the environment of use. In certain embodiments, the coating is polymeric, aqueous-permeable, and has at least one delivery port. The core of the osmotic device optionally includes an osmotic agent which acts to imbibe water from the surrounding environment via such a semi-permeable membrane. The osmotic agent contained in the core of this device may be an aqueous-swellable hydrophilic polymer or it may be an osmogen, also known as an osmagent. Pressure is generated within the device which forces the agent(s) out of the device via an orifice (of a size designed to minimize solute diffusion while preventing the build-up of a hydrostatic pressure head).

[0445] Osmotic agents create a driving force for transport of water from the environment of use into the core of the device. Osmotic agents include but are not limited to water-swellable hydrophilic polymers, and osmogens (or osmagens). Thus, the core may include water-swellable hydrophilic polymers, both ionic and nonionic, often referred to as osmopolymers and hydrogels. The amount of water-swellable hydrophilic polymers present in the core may range from about 5 to about 80 wt % (including for example, 10 to 50 wt %). Nonlimiting examples of core materials include hydrophilic vinyl and acrylic polymers, polysaccharides such as calcium alginate, polyethylene oxide (PEO), polyethylene glycol (PEG), polypropylene glycol (PPG), poly (2-hydroxyethyl methacrylate), poly (acrylic) acid, poly (methacrylic) acid, polyvinylpyrrolidone (PVP) and crosslinked PVP, polyvinyl alcohol (PVA), PVA/PVP copolymers and PVA/PVP copolymers with hydrophobic monomers such as methyl methacrylate, vinyl acetate, and the like, hydrophilic polyurethanes containing large PEO blocks, sodium croscarmellose, carrageenan, hydroxyethyl cellulose (HEC), hydroxypropyl cellulose (HPC), hydroxypropyl methyl cellulose (HPMC), carboxymethyl cellulose (CMC) and carboxyethyl cellulose (CEC), sodium alginate, polycarbophil, gelatin, xanthan gum, and sodium starch glycolat. Other materials include hydrogels comprising interpenetrating networks of polymers that may be formed by addition or by condensation polymerization, the components of which may comprise hydrophilic and hydrophobic monomers such as those just mentioned. Water-swellable hydrophilic polymers include but are not limited to PEO, PEG, PVP, sodium croscarmellose, HPMC, sodium starch glycolate, polyacrylic acid and crosslinked versions or mixtures thereof.

[0446] The core may also include an osmogen (or osmagent). The amount of osmogen present in the core may range from about 2 to about 70 wt % (including, for example, from 10 to 50 wt %). Typical classes of suitable osmogens are water-soluble organic acids, salts and sugars that are capable of imbibing water to thereby effect an osmotic pressure gradient across the barrier of the surrounding coating. Typical useful osmogens include but are not limited to magnesium sulfate, magnesium chloride, calcium chloride, sodium chloride, lithium chloride, potassium sulfate, sodium carbonate, sodium sulfite, lithium sulfate, potassium chloride, sodium sulfate, mannitol, xylitol, urea, sorbitol, inositol, raffinose, sucrose, glucose, fructose, lactose, citric acid, succinic acid, tartaric acid, and mixtures thereof. In certain embodiments, the osmogen is glucose, lactose, sucrose, mannitol, xylitol, sodium chloride, including combinations thereof.

[0447] The core may include a wide variety of additives and excipients that enhance the performance of the dosage form or that promote stability, tableting or processing. Such additives and excipients include tableting aids, surfactants, water-soluble polymers, pH modifiers, fillers, binders, pigments, disintegrants, antioxidants, lubricants and flavorants. Nonlimiting examples of additives and excipients include but are not limited to those described elsewhere herein as well as microcrystalline cellulose, metallic salts of acids (e.g. aluminum stearate, calcium stearate, magnesium stearate, sodium stearate, zinc stearate), pH control agents (e.g. buffers, organic acids, organic acid salts, organic and inorganic bases), fatty acids, hydrocarbons and fatty alcohols (e.g. stearic acid, palmitic acid, liquid paraffin, stearyl alcohol, and palmitol), fatty acid esters (e.g. glyceryl (mono- and di-) stearates, triglycerides, glyceryl (palmiticstearic) ester, sorbitan esters (e.g. sorbitan monostearate, saccharose monostearate, saccharose monopalmitate, sodium stearyl fumarate), polyoxyethylene sorbitan esters), surfactants (e.g. alkyl sulfates (e.g. sodium lauryl sulfate, magnesium lauryl sulfate), polymers (e.g. polyethylene glycols, polyoxyethylene glycols, polyoxyethylene, polyoxypropylene ethers, including copolymers thereof), polytetrafluoroethylene), and inorganic materials (e.g. talc, calcium phosphate), cyclodextrins, sugars (e.g. lactose, xylitol), sodium starch glycolate). Nonlimiting examples of disintegrants are sodium starch glycolate (e.g., Explotab™ CLV, (microcrystalline cellulose (e.g., Avicel™), microcrystalline silicified cellulose (e.g., ProSolv™), croscarmellose sodium (e.g., Ac-Di-Sol™). When the agent described herein is a solid amorphous dispersion formed by a solvent process, such additives may be added directly to the spray-drying solution when forming an agent described herein/concentration-enhancing polymer dispersion such that the additive is dissolved or suspended in the solution as a slurry, Alternatively, such additives may be added following the spray-drying process to aid in forming the final controlled release device.

[0448] A nonlimiting example of an osmotic device consists of one or more drug layers containing an agent described herein, such as a solid amorphous drug/polymer dispersion, and a sweller layer that comprises a water-swellable polymer, with a coating surrounding the drug layer and sweller layer. Each layer may contain other excipients such as tableting aids, osmagents, surfactants, water-soluble polymers and water-swellable polymers.

[0449] Such osmotic delivery devices may be fabricated in various geometries including bilayer (wherein the core comprises a drug layer and a sweller layer adjacent to each other), trilayer (wherein the core comprises a sweller layer sandwiched between two drug layers) and concentric (wherein the core comprises a central sweller agent surrounded by the drug layer). The coating of such a tablet comprises a membrane permeable to water but substantially impermeable to drug and excipients contained within. The coating contains one or more exit passageways or ports in communication with the drug-containing layer(s) for delivering the drug agent. The drug-containing layer(s) of the core contains the drug agent (including optional osmagents and hydrophilic water-soluble polymers), while the sweller layer consists of an expandable hydrogel, with or without additional osmotic agents.

[0450] When placed in an aqueous medium, the tablet imbibes water through the membrane, causing the agent to form a dispensable aqueous agent, and causing the hydrogel layer to expand and push against the drug-containing agent, forcing the agent out of the exit passageway. The agent can swell, aiding in forcing the drug out of the passageway. Drug can be delivered from this type of delivery system either dissolved or dispersed in the agent that is expelled from the exit passageway.

[0451] The rate of drug delivery is controlled by such factors as the permeability and thickness of the coating, the osmotic pressure of the drug-containing layer, the degree of hydrophilicity of the hydrogel layer, and the surface area of the device. Those skilled in the art will appreciate that increasing the thickness of the coating will reduce the release rate, while any of the following will increase the release rate: increasing the permeability of the coating; increasing the hydrophilicity of the hydrogel layer; increasing the osmotic pressure of the drug-containing layer; or increasing the device's surface area.

[0452] Other materials useful in forming the drug-containing agent, in addition to the agent described herein itself, include HPMC, PEO and PVP and other pharmaceutically acceptable carriers. In addition, osmagents such as sugars or salts, including but not limited to sucrose, lactose, xylitol, mannitol, or sodium chloride, may be added. Materials which are useful for forming the hydrogel layer include sodium CMC, PEO (e.g. polymers having an average molecular weight from about 5,000,000 to about 7,500,000 daltons), poly (acrylic acid), sodium (polyacrylate), sodium croscarmellose, sodium starch glycolat, PVP, crosslinked PVP, and other high molecular weight hydrophilic materials.

[0453] In the case of a bilayer geometry, the delivery port(s) or exit passageway(s) may be located on the side of the tablet containing the drug agent or may be on both sides of the tablet or even on the edge of the tablet so as to connect both the drug layer and the sweller layer with the exterior of the device. The exit passageway(s) may be produced by mechanical means or by laser drilling, or by creating a difficult-to-coat region on the tablet by use of special tooling during tablet compression or by other means.

[0454] The osmotic device can also be made with a homogeneous core surrounded by a semipermeable membrane coating, as in U.S. Pat. No. 3,845,770. The agent described herein can be incorporated into a tablet core and a semipermeable membrane coating can be applied via conventional tablet-coating techniques such as using a pan coater. A drug delivery passageway can then be formed in this coating by drilling a hole in the coating, either by use of a laser or mechanical means. Alternatively, the passageway may be formed by rupturing a portion of the coating or by creating a region on the tablet that is difficult to coat, as described above. In one embodiment, an osmotic device comprises: (a) a single-layer compressed core comprising: (i) an agent described herein, (ii) a hydroxyethylcellulose, and (iii) an osmagent, wherein the hydroxyethylcellulose is present in the core from about 2.0% to about 35% by weight and the osmagent is present from about 15% to about 70% by weight; (b) a water-permeable layer surrounding the core; and (c) at least one passageway within the water-permeable layer (b) for delivering the drug to a fluid environment surrounding the tablet. In certain embodiments, the device is shaped such that the surface area to volume ratio (of a water-swollen tablet) is greater than 0.6 mm⁻¹ (including, for example, greater than 1.0 mm⁻¹). The passageway connecting the core with the fluid environment can be situated along the tablet band area. In certain embodiments, the shape is an oblong shape where the ratio of the tablet tooling axes, i.e., the major and minor axes which define the shape of the tablet, are between 1.3 and 3 (including, for example, between 1.5 and 2.5). In one embodiment, the combination of the agent described herein and the osmagent have an average ductility from about 100 to about 200 Mpa, an average tensile strength from about 0.8 to about 2.0 Mpa, and an average brittle fracture index less than about 0.2. The single-layer core may optionally include a disintegrant, a bioavailability enhancing additive, and/or a pharmaceutically acceptable excipient, carrier or diluent.

[0455] In certain embodiments, entrainment of particles of agents described herein in the extruding fluid during operation of such osmotic device is desirable. For the particles to be well entrained, the agent drug form is dispersed in the fluid before the particles have an opportunity to settle in the tablet core. One means of accomplishing this is by adding a disintegrant that serves to break up the compressed core into its particulate components. Nonlimiting examples of standard disintegrants include materials such as sodium starch glycolate (e.g., Explotab™ CLV), microcrystalline cellulose (e.g., Avicel™), microcrystalline silicified cellulose (e.g., ProSoIv™) and croscarmellose sodium (e.g., Ac-Di-Sol™), and other disintegrants known to those skilled in the art. Depending upon the particular formulation, some disintegrants work better than others. Several disintegrants tend to form gels as they swell with water, thus hindering drug delivery from the device. Non-gelling, non-swelling disintegrants provide a more rapid dispersion of the drug particles within the core as water enters the core. In certain embodiments, non-gelling, non-swelling disintegrants are resins, for example, ion-exchange resins. In one embodiment, the resin is Amberlite™ IRP 88 (available from Rohm and Haas, Philadelphia, Pa.). When used, the disintegrant is present in amounts ranging from about 50-74% of the core agent.

[0456] Water-soluble polymers are added to keep particles of the agent suspended inside the device before they can be delivered through the passageway(s) (e.g., an orifice). High viscosity polymers are useful in preventing settling. However, the polymer in combination with the agent is extruded through the passageway(s) under relatively low pressures. At a given extrusion pressure, the extrusion rate typically slows with increased viscosity. Certain polymers in combination with particles of the agent described herein form high viscosity solutions with water but are still capable of being extruded from the tablets with a relatively low force. In contrast, polymers having a low weight-average, molecular weight (<about 300,000) do not form sufficiently viscous solutions inside the tablet core to allow complete delivery due to particle settling. Settling of the particles is a problem when such devices are prepared with no polymer added, which leads to poor drug delivery unless the tablet is constantly agitated to keep the particles from settling inside the core. Settling is also problematic when the particles are large and/or of high density such that the rate of settling increases.

[0457] In certain embodiments, the water-soluble polymers for such osmotic devices do not interact with the drug. In certain embodiments the water-soluble polymer is a non-ionic polymer. A nonlimiting example of a non-ionic polymer forming solutions having a high viscosity yet still extrudable at low pressures is Natrosol™ 250H (high molecular weight hydroxyethylcellulose, available from Hercules Incorporated, Aqualon Division, Wilmington, Del.; MW equal to about 1 million daltons and a degree of polymerization equal to about 3,700). Natrosol 250H™ provides effective drug delivery at concentrations as low as about 3% by weight of the core when combined with an osmagent. Natrosol 250H™ NF is a high-viscosity grade nonionic cellulose ether that is soluble in hot or cold water. The viscosity of a 1% solution of Natrosol 250H using a Brookfield LVT (30 rpm) at 25° C. is between about 1, 500 and about 2,500 cps.

[0458] In certain embodiments, hydroxyethylcellulose polymers for use in these monolayer osmotic tablets have a weight-average, molecular weight from about 300,000 to about 1.5 million. The hydroxyethylcellulose polymer is typically present in the core in an amount from about 2.0% to about 35% by weight.

[0459] Another example of an osmotic device is an osmotic capsule. The capsule shell or portion of the capsule shell can be semipermeable. The capsule can be filled either by a powder or liquid consisting of an agent described herein, excipients that imbibe water to provide osmotic potential, and/or a water-swellable polymer, or optionally solubilizing excipients. The capsule core can also be made such that it has a bilayer or multilayer agent analogous to the bilayer, trilayer or concentric geometries described above.

[0460] Another class of osmotic device useful in this invention comprises coated swellable tablets, for example, as described in EP378404. Coated swellable tablets comprise a tablet core comprising an agent described herein and a swelling material, preferably a hydrophilic polymer, coated with a membrane, which contains holes, or pores through which, in the aqueous use environment, the hydrophilic polymer can extrude and carry out the agent. Alternatively, the membrane may contain polymeric or low molecular weight water-soluble porosigens. Porosigens dissolve in the aqueous use environment, providing pores through which the hydrophilic polymer and agent may extrude. Examples of porosigens are water-soluble polymers such as HPMC, PEG, and low molecular weight compounds such as glycerol, sucrose, glucose, and sodium chloride. In addition, pores may be formed in the coating by drilling holes in the coating using a laser or other mechanical means. In this class of osmotic devices, the membrane material may comprise any film-forming polymer, including polymers which are water permeable or impermeable, providing that the membrane deposited on the tablet core is porous or contains water-soluble porosigens or possesses a macroscopic hole for water ingress and drug release. Embodiments of this class of sustained release devices may also be multilayered, as described, for example, in EP378404.

[0461] When an agent described herein is a liquid or oil, such as a lipid vehicle formulation, for example as described in WO05/011634, the osmotic controlled-release device may comprise a soft-gel or gelatin capsule formed with a composite wall and comprising the liquid formulation where the wall comprises a barrier layer formed over the external surface of the capsule, an expandable layer formed over the barrier layer, and a semipermeable layer formed over the expandable layer. A delivery port connects the liquid formulation with the aqueous use environment. Such devices are described, for example, in U.S. Pat. No. 6,419,952, U.S. Pat. No. 6,342,249, U.S. Pat. No. 5,324,280, U.S. Pat. No. 4,672,850, U.S. Pat. No. 4,627,850, U.S. Pat. No. 4,203,440, and U.S. Pat. No. 3,995,631.

[0462] The osmotic controlled release devices of the present invention can also comprise a coating. In certain embodiments, the osmotic controlled release device coating exhibits one or more of the following features: is water-permeable, has at least one port for the delivery of drug, and is non-dissolving and non-eroding during release of the drug formulation, such that drug is substantially entirely delivered through the delivery port(s) or pores as opposed to delivery primarily via permeation through the coating material itself. Delivery ports include any passageway, opening or pore whether made mechanically, by laser drilling, by pore formation either during the coating process or in situ during use or by rupture during use. In certain embodiments, the coating is present in an amount ranging from about 5 to 30 wt % (including, for example, 10 to 20 wt %) relative to the core weight.

[0463] One form of coating is a semipermeable polymeric membrane that has the port(s) formed therein either prior to or during use. Thickness of such a polymeric membrane may vary between about 20 and 800 μm (including, for example, between about 100 to 500 μm). The diameter of the delivery port (s) may generally range in size from 0.1 to 3000 μm or greater (including, for example, from about 50 to 3000 μm in diameter). Such port(s) may be formed post-coating by mechanical or laser drilling or may be formed in situ by rupture of the coatings; such rupture may be controlled by intentionally incorporating a relatively small weak portion into the coating. Delivery ports may also be formed in situ by erosion of a plug of water-soluble material or by rupture of a thinner portion of the coating over an indentation in the core. In addition, delivery ports may be formed during coating, as in the case of asymmetric membrane coatings of the type disclosed in U.S. Pat. No. 5,612,059 and U.S. Pat. No. 5,698,220. The delivery port may be formed in situ by rupture of the coating, for example, when a collection of beads that may be of essentially identical or of a variable agent are used. Drug is primarily released from such beads following rupture of the coating and, following rupture, such release may be gradual or relatively sudden. When the collection of beads has a variable agent, the agent may be chosen such that the beads rupture at various times following administration, resulting in the overall release of drug being sustained for a desired duration.

[0464] Coatings may be dense, microporous or asymmetric, having a denser region supported by a thick porous region such as those disclosed in U.S. Pat. No. 5,612,059 and U.S. Pat. No. 5,698,220. When the coating is dense the coating can be composed of a water-permeable material. When the coating is porous, it may be composed of either a water-permeable or a water-impermeable material. When the coating is composed of a porous water-impermeable material, water permeates through the pores of the coating as either a liquid or a vapor. Nonlimiting examples of osmotic devices that utilize dense coatings include U.S. Pat. No. 3,995,631 and U.S. Pat. No. 3,845,770. Such dense coatings are permeable to the external fluid such as water and may be composed of any of the materials mentioned in these patents as well as other water-permeable polymers known in the art. The membranes may also be porous as disclosed, for example, in U.S. Pat. No. 5,654,005 and U.S. Pat. No. 5,458,887 or even be formed from water-resistant polymers. U.S. Pat. No. 5,120,548 describes another suitable process for forming coatings from a mixture of a water-insoluble polymer and a leachable water-soluble additive. The porous membranes may also be formed by the addition of pore-formers as disclosed in U.S. Pat. No. 4,612,008. In addition, vapor-permeable coatings may even be formed from extremely hydrophobic materials such as polyethylene or polyvinylidene difluorid that, when dense, are essentially water-impermeable, as long as such coatings are porous. Materials useful in forming the coating include but are not limited to various grades of acrylic, vinyls, ethers, polyamides, polyesters and cellulosic derivatives that are water-permeable and water-insoluble at physiologically relevant pHs, or are susceptible to being rendered water-insoluble by chemical alteration such as by crosslinking. Nonlimiting examples of suitable polymers (or crosslinked versions) useful in forming the coating include plasticized, unplasticized and reinforced cellulose acetate (CA), cellulose diacetate, cellulose triacetate, CA propionate, cellulose nitrate, cellulose acetate butyrate (CAB), CA ethyl carbamate, CAP, CA methyl carbamate, CA succinate, cellulose acetate trimellitate (CAT), CA dimethylaminoacetate, CA ethyl carbonate, CA chloroacetate, CA ethyl oxalate, CA methyl sulfonate, CA butyl sulfonate, CA p-toluene sulfonate, agar acetate, amylose triacetate, beta glucan acetate, beta glucan triacetate, acetaldehyde dimethyl acetate, triacetate of locust bean gum, hydroxiated ethylene-vinylacetate, EC, PEG, PPG, PEG/PPG copolymers, PVP, HEC, HPC, CMC, CMEC, HPMC, HPMCP, HPMCAS, HPMCAT, poly (acrylic) acids and esters and poly-(methacrylic) acids and esters and copolymers thereof, starch, dextran, dextrin, chitosan, collagen, gelatin, polyalkenes, polyethers, polysulfones, polyethersulfones, polystyrenes, polyvinyl halides, polyvinyl esters and ethers, natural waxes and synthetic waxes. In various embodiments, the coating agent comprises a cellulosic polymer, in particular cellulose ethers, cellulose esters and cellulose ester-ethers, i.e., cellulosic derivatives having a mixture of ester and ether substituents, the coating materials are made or derived from poly (acrylic) acids and esters, poly (methacrylic) acids and esters, and copolymers thereof, the coating agent comprises cellulose acetate, the coating comprises a cellulosic polymer and PEG, the coating comprises cellulose acetate and PEG.

[0465] Coating is conducted in conventional fashion, typically by dissolving or suspending the coating material in a solvent and then coating by dipping, spray coating or by pan-coating. In certain embodiments, the coating solution contains 5 to 15 wt % polymer. Typical solvents useful with the cellulosic polymers mentioned above include but are not limited to acetone, methyl acetate, ethyl acetate, isopropyl acetate, n-butyl acetate, methyl isobutyl ketone, methyl propyl ketone, ethylene glycol monoethyl ether, ethylene glycol monoethyl acetate, methylene dichloride, ethylene dichloride, propylene dichloride, nitroethane, nitropropane, tetrachloroethane, 1,4-dioxane, tetrahydrofuran, diglyme, water, and mixtures thereof. Pore-formers and non-solvents (such as water, glycerol and ethanol) or plasticizers (such as diethyl phthalate) may also be added in any amount as long as the polymer remains soluble at the spray temperature. Pore-formers and their use in fabricating coatings are described, for example, in U.S. Pat. No. 5,612,059. Coatings may also be hydrophobic microporous layers wherein the pores are substantially filled with a gas and are not wetted by the aqueous medium but are permeable to water vapor, as disclosed, for example, in U.S. Pat. No. 5,798,119. Such hydrophobic but water-vapor permeable coatings are typically composed of hydrophobic polymers such as polyalkenes, polyacrylic acid derivatives, polyethers, polysulfones, polyethersulfones, polystyrenes, polyvinyl halides, polyvinyl esters and ethers, natural waxes and synthetic waxes. Hydrophobic microporous coating materials include but are not limited to polystyrene, polysulfones, polyethersulfones, polyethylene, polypropylene, polyvinyl chloride, polyvinylidene fluoride and polytetrafluoroethylene. Such hydrophobic coatings can be made by known phase inversion methods using any of vapor-quench, liquid quench, thermal processes, leaching soluble material from the coating or by sintering coating particles. In thermal processes, a solution of polymer in a latent solvent is brought to liquid-liquid phase separation in a cooling step. When evaporation of the solvent is not prevented, the resulting membrane will typically be porous. Such coating processes may be conducted by the processes disclosed, for example, in U.S. Pat. No. 4,247,498, U.S. Pat. No. 4,490,431 and U.S. Pat. No. 4,744,906. Osmotic controlled-release devices may be prepared using procedures known in the pharmaceutical arts. See for example, Remington: The Science and Practice of Pharmacy, 20th Edition, 2000.

[0466] As further noted above, the agents described herein may be provided in the form of microparticulates, generally ranging in size from about 10 μm to about 2 mm (including, for example, from about 100 μm to 1 mm in diameter). Such multiparticulates may be packaged, for example, in a capsule such as a gelatin capsule or a capsule formed from an aqueous-soluble polymer such as HPMCAS, HPMC or starch; dosed as a suspension or slurry in a liquid; or they may be formed into a tablet, caplet, or pill by compression or other processes known in the art. Such multiparticulates may be made by any known process, such as wet- and dry-granulation processes, extrusion/spheronization, roller-compaction, melt-congealing, or by spray-coating seed cores. For example, in wet- and dry-granulation processes, the agent described herein and optional excipients may be granulated to form multiparticulates of the desired size. Other excipients, such as a binder (e.g., microcrystalline cellulose), may be blended with the agent to aid in processing and forming the multiparticulates. In the case of wet granulation, a binder such as microcrystalline cellulose may be included in the granulation fluid to aid in forming a suitable multiparticulate. See, for example, Remington: The Science and Practice of Pharmacy, 20” Edition, 2000. In any case, the resulting particles may themselves constitute the therapeutic composition or they may be coated by various film-forming materials such as enteric polymers or water-swellable or water-soluble polymers, or they may be combined with other excipients or vehicles to aid in dosing to patients. Suitable pharmaceutical compositions in accordance with the invention will generally include an amount of the active compound(s) with an acceptable pharmaceutical diluent or excipient, such as a sterile aqueous solution, to give a range of final concentrations, depending on the intended use. The techniques of preparation are generally well known in the art, as exemplified by Remington's Pharmaceutical Sciences (18th Edition, Mack Publishing Company, 1995).

### Kits

[0467] The agents described herein and combination therapy agents can be packaged as a kit that includes single or multiple doses of two or more agents, each packaged or formulated individually, or single or multiple doses of two or more agents packaged or formulated in combination. Thus, one or more agents can be present in first container, and the kit can optionally include one or more agents in a second container. The container or containers are placed within a package, and the package can optionally include administration or dosage instructions. A kit can include additional components such as syringes or other means for administering the agents as well as diluents or other means for formulation.

[0468] Thus, the kits can comprise: a) a pharmaceutical composition comprising a compound described herein and a pharmaceutically acceptable carrier, vehicle or diluent; and b) a container or packaging. The kits may optionally comprise instructions describing a method of using the pharmaceutical compositions in one or more of the methods described herein (e.g. gastrointestinal motility disorders, chronic intestinal pseudo-obstruction, colonic pseudo-obstruction, Crohn's disease, duodenogastric reflux, dyspepsia, functional dyspepsia, nonulcer dyspepsia, a functional gastrointestinal disorder, functional heartburn, gastroesophageal reflux disease (GERD), gastroparesis, irritable bowel syndrome, post-operative ileus, ulcerative colitis, chronic constipation, and disorders and conditions associated with constipation (e.g. constipation associated with use of opiate pain killers, post-surgical constipation, and constipation associated with neuropathic disorders as well as other conditions and disorders described herein). The kit may optionally comprise a second pharmaceutical composition comprising one or more additional agents including but not limited to those including analgesic peptides and compounds, a phosphodiesterase inhibitor, an agent used to treat gastrointestinal and other disorders (including those described herein), an agent used to treat constipation, an antidiarrheal agent, an insulin or related compound (including those described herein), an anti-hypertensive agent, an agent useful in the treatment of respiratory and other disorders, an anti-obesity agent, an anti-diabetic agents, an agent that activates soluble guanylate cyclase and a pharmaceutically acceptable carrier, vehicle or diluent. The pharmaceutical composition comprising the compound described herein and the second pharmaceutical composition contained in the kit may be optionally combined in the same pharmaceutical composition.

[0469] A kit includes a container or packaging for containing the pharmaceutical compositions and may also include divided containers such as a divided bottle or a divided foil packet. The container can be, for example a paper or cardboard box, a glass or plastic bottle or jar, a re-sealable bag (for example, to hold a “refill” of tablets for placement into a different container), or a blister pack with individual doses for pressing out of the pack according to a therapeutic schedule. It is feasible that more than one container can be used together in a single package to market a single dosage form. For example, tablets may be contained in a bottle which is in turn contained within a box.

[0470] An example of a kit is a so-called blister pack. Blister packs are well known in the packaging industry and are being widely used for the packaging of pharmaceutical unit dosage forms (tablets, capsules, and the like). Blister packs generally consist of a sheet of relatively stiff material covered with a foil of a preferably transparent plastic material. During the packaging process, recesses are formed in the plastic foil. The recesses have the size and shape of individual tablets or capsules to be packed or may have the size and shape to accommodate multiple tablets and/or capsules to be packed. Next, the tablets or capsules are placed in the recesses accordingly and the sheet of relatively stiff material is sealed against the plastic foil at the face of the foil which is opposite from the direction in which the recesses were formed. As a result, the tablets or capsules are individually sealed or collectively sealed, as desired, in the recesses between the plastic foil and the sheet. Preferably the strength of the sheet is such that the tablets or capsules can be removed from the blister pack by manually applying pressure on the recesses whereby an opening is formed in the sheet at the place of the recess. The tablet or capsule can then be removed via said opening.

[0471] It maybe desirable to provide a written memory aid containing information and/or instructions for the physician, pharmacist or subject regarding when the medication is to be taken. A “daily dose” can be a single tablet or capsule or several tablets or capsules to be taken on a given day. When the kit contains separate compositions, a daily dose of one or more compositions of the kit can consist of one tablet or capsule while a daily dose of another one or more compositions of the kit can consist of several tablets or capsules. A kit can take the form of a dispenser designed to dispense the daily doses one at a time in the order of their intended use. The dispenser can be equipped with a memory-aid, so as to further facilitate compliance with the regimen. An example of such a memory-aid is a mechanical counter which indicates the number of daily doses that have been dispensed. Another example of such a memory-aid is a battery-powered micro-chip memory coupled with a liquid crystal readout, or audible reminder signal which, for example, reads out the date that the last daily dose has been taken and/or reminds one when the next dose is to be taken.

[0472] Methods to increase chemical and/or physical stability of the agents the described herein are found in U.S. Pat. No. 6,541,606, U.S. Pat. No. 6,068,850, U.S. Pat. No. 6,124,261, U.S. Pat. No. 5,904,935, and WO 00/15224, U.S. 20030069182 (via the addition of nicotinamide), U.S. 20030175230A1, U.S. 20030175230A1, U.S. 20030175239A1, U.S. 20020045582, U.S. 20010031726, WO 02/26248, WO 03/014304, WO 98/00152A1, WO 98/00157A1, WO 90/12029, WO 00/04880, and WO 91/04743, WO 97/04796 and the references cited therein.

[0473] Methods to increase bioavailability of the agents described herein are found in U.S. Pat. No. 6,008,187, U.S. Pat. No. 5,424,289, U.S. 20030198619, WO 90/01329, WO 01/49268, WO 00/32172, and WO 02/064166. Glycyrrhizinate can also be used as an absorption enhancer (see, e.g., EP397447). WO 03/004062 discusses Ulex europaeus I (UEA1) and UEAI mimetics which may be used to target the agents of the invention to the GI tract. The bioavailability of the agents described herein can also be increased by addition of oral bioavailability-enhancing agents such as those described in U.S. Pat. No. 6,818,615 including but not limited to: cyclosporins (including cyclosporins A through Z as defined in Table 1 of U.S. Pat. No. 6,818,615), for example, cyclosporin A (cyclosporin), cyclosporin F, cyclosporin D, dihydro cyclosporin A, dihydro cyclosporin C, acetyl cyclosporin A, PSC-833, (Me-Ile-4)-cyclosporin (SDZ-NIM 811) (both from Sandoz Pharmaceutical Corp.), and related oligopeptides produced by species in the genus Topycladium); antifungals including but not limited to ketoconazole; cardiovascular drug including but not limited to MS-209 (BASF), amiodarone, nifedipine, reserpine, quinidine, nicardipine, ethacrynic acid, propafenone, reserpine, amiloride; anti-migraine natural products including but not limited to ergot alkaloids; antibiotics including but not limited to cefoperazone, tetracycline, chloroquine, fosfomycin; antiparasitics including but not limited to ivermectin; multi-drug resistance reversers including but not limited to VX-710 and VX-853 (Vertex Pharmaceutical Incorporated); tyrosine kinase inhibitors including but not limited to genistein and related isoflavonoids, quercetin; protein kinase C inhibitors including but not limited to calphostin; apoptosis inducers including but not limited to ceramides; and agents active against endorphin receptors including but not limited to morphine, morphine congeners, other opioids and opioid. antagonists including (but not limited to) naloxone, naltrexone and nalmefene).

[0474] The agents described herein can be fused to a modified version of the blood serum protein transferrin. U.S. 20030221201, U.S. 20040023334, U.S. 20030226155, WO 04/020454, and WO 04/019872 discuss the manufacture and use of transferrin fusion proteins. Transferrin fusion proteins may improve circulatory half life and efficacy, decrease undesirable side effects and allow reduced dosage.

[0475] The peptides and agonists described herein can be recombinantly expressed in bacteria. Bacteria expressing the peptide or agonists can be administered orally, rectally, mucosally or in via some other mode of administration including but not limited to those described herein. Bacterial hosts suitable for such administration include but are not limited to certain Lactobacteria (e.g. Lactococcus lactis, Lactobacillus plantarum, Lact. rhamnosus and Lact. paracasei ssp. Paracasie and other species found in normal human flora (Ahrne et al. Journal of Applied Microbiology 1998 85:88)), certain Streptococcus sp. (e.g. S. gordonii), and certain B. subtilis strains (including pSM539 described in Porzio et al. BMC Biotechnology 2004 4:27). The polypeptides and agonists described herein can be administered using the Heliobacter based preparation methods described in WO06/015445. Bacteria expressing the peptides/agonists described herein may comprise DNA encoding the peptide/agonist on one or more bacterial chromosomes and/or may comprise DNA encoding the peptide/agonist on one or more extrachromosomal elements.

### Dosage

[0476] The dose range for adult humans is generally from 0.005 mg to 10 g/day orally. Tablets or other forms of presentation provided in discrete units may conveniently contain an amount of compound of the invention which is effective at such dosage or as a multiple of the same, for instance, units containing 5 mg to 500 mg, usually around 10 mg to 200 mg. The precise amount of compound administered to a patient will be the responsibility of the attendant physician. However, the dose employed will depend on a number of factors, including the age and sex of the patient, the precise disorder being treated, and its severity.

[0477] A dosage unit (e.g. an oral dosage unit) can include from, for example, 1 to 30 μg, to 40 μg, 1 to 50 μg, 1 to 100 μg, to 200 μg, 1 to 300 μg, 1 to 400 μg, 1 to 500 μg, 1 to 600 μg, 1 to 700 μg, 1 to 800 μg, 1 to 900 μg, 1 to 1000 μg, 10 to 30 μg. 10 to 40 μg, 10 to 50 μg, 10 to 100 μg, 10 to 200 μg, 10 to 300 μg, 10 to 400 μg, 10 to 500 μg, 10 to 600 μg, 10 to 700 μg, 10 to 800 μg, 10 to 900 μg. 10 to 1000 μg, 100 to 200 μg, 100 to 300 μg, 100 to 400 μg, 100 to 500 μg, 100 to 600 μg, 100 to 700 μg, 100 to 800 μg, 100 to 900 μg, 100 to 1000 μg, 100 to 1250 μg, 100 to 1500 μg, 100 to 1750 μg, 100 to 2000 μg, 100 to 2250 μg, 100 to 2500 μg. 100 to 2750 μg. 100 to 3000 μg. 200 to 300 μg. 200 to 400 μg, 200 to 500 μg. 200 to 600 μg. 200 to 700 μg. 200 to 800 μg. 200 to 900 μg, 200 to 1000 μg. 200 to 1250 μg. 200 to 1500 μg. 200 to 1750 μg. 200 to 2000 μg, 200 to 2250 μg. 200 to 2500 μg. 200 to 2750 μg. 200 to 3000 μg. 300 to 400 μg, 300 to 500 μg, 300 to 600 μg, 300 to 700 μg, 300 to 800 μg, 300 to 900 μg. 300 to 1000 μg. 300 to 1250 μg. 300 to 1500 μg. 300 to 1750 μg. 300 to 2000 μg, 300 to 2250 μg, 300 to 2500 μg, 300 to 2750 μg, 300 to 3000 μg. 400 to 500 μg. 400 to 600 μg. 400 to 700 μg, 400 to 800 μg. 400 to 900 μg. 400 to 1000 μg, 400 to 1250 μg, 400 to 1500 μg, 400 to 1750 μg, 400 to 2000 μg, 400 to 2250 μg, 400 to 2500 μg, 400 to 2750 μg. 400 to 3000 μg, 500 to 600 μg, 500 to 700 μg, 500 to 800 μg, 500 to 900 μg, 500 to 1000 μg, 500 to 1250 μg, 500 to 1500 μg, 500 to 1750 μg, 500 to 2000 μg, 500 to 2250 μg, 500 to 2500 μg, 500 to 2750 μg, 500 to 3000 μg, 600 to 700 μg. 600 to 800 μg, 600 to 900 μg. 600 to 1000 μg, 600 to 1250 μg, 600 to 1500 μg. 600 to 1750 μg, 600 to 2000 μg, 600 to 2250 μg, 600 to 2500 μg, 600 to 2750 μg, 600 to 3000 μg, 700 to 800 μg, 700 to 900 μg, 700 to 1000 μg, 700 to 1250 μg, 700 to 1500 μg, 700 to 1750 μg, 700 to 2000 μg, 700 to 2250 μg, 700 to 2500 μg, 700 to 2750 μg, 700 to 3000 μg, 800 to 900 μg, 800 to 1000 μg, 800 to 1250 μg, 800 to 1500 μg, 800 to 1750 μg, 800 to 2000 μg, 800 to 2250 μg, 800 to 2500 μg, 800 to 2750 μg, 800 to 3000 μg, 900 to 1000 μg, 900 to 1250 μg, 900 to 1500 μg, 900 to 1750 μg, 900 to 2000 μg, 900 to 2250 μg, 900 to 2500 μg, 900 to 2750 μg, 900 to 3000 μg, 1000 to 1250 μg, 1000 to 1500 μg. 1000 to 1750 μg, 1000 to 2000 μg, 1000 to 2250 μg, 1000 to 2500 μg, 1000 to 2750 μg, 1000 to 3000 μg, 2 to 500 μg, 50 to 500 μg, 3 to 10 μg, 5 to 20 μg, 5 to 100 μg, 50 μg, 100 μg, 150 μg, 200 μg, 250 μg, 300 μg, 350 μg, 400 μg, 450 μg, 500 μg, 550 μg, 600 μg, 650 μg, 700 μg, 750 μg, 800 μg, 850 μg, 900 μg, 950 μg, 1000 μg, 1050 μg, 1100 μg, 1150 μg, 1200 μg, 1250 μg, 1300 μg, 1350 μg, 1400 μg, 1450 μg, 1500 μg, 1550 μg, 1600 μg, 1650 μg, 1700 μg, 1750 μg, 1800 μg, 1850 μg, 1900 μg, 1950 μg, 2000 μg, 2050 μg, 2100 μg, 2150 μg, 2200 μg, 2250 μg, 2300 μg, 2350 μg, 2400 μg, 2450 μg, 2500 μg, 2550 μg, 2600 μg, 2650 μg, 2700 μg, 2750 μg, 2800 μg, 2850 μg, 2900 μg, 2950 μg, 3000 μg, 3250 μg, 3500 μg, 3750 μg, 4000 μg, 4250 μg, 4500 μg, 4750 μg, 5000 μg of a peptide or agonist described herein. In certain embodiments the dosage unit and daily dose are equivalent. In various embodiments, the dosage unit is administered with food at anytime of the day, without food at anytime of the day, with food after an overnight fast (e.g. with breakfast), at bedtime after a low fat snack. In various embodiments, the dosage unit is administered once a day, twice a day, three times a day, four times a day, five times a day, six times a day. The dosage unit can optionally comprise other agents.

[0478] A dosage unit (e.g. an oral dosage unit) can include, for example, from 1 to 30 μg, to 40 μg, 1 to 50 μg, 1 to 100 μg, to 200 μg, 1 to 300 μg, 1 to 400 μg, 1 to 500 μg, 1 to 600 μg, 1 to 700 μg, 1 to 800 μg, 1 to 900 μg, 1 to 1000 μg, 10 to 30 μg, 10 to 40 μg, 10 to 50 μg, 10 to 100 μg, 10 to 200 μg, 10 to 300 μg, 10 to 400 μg, 10 to 500 μg, 10 to 600 μg, 10 to 700 μg, 10 to 800 μg, 10 to 900 μg, 10 to 1000 μg, 100 to 200 μg, 100 to 300 μg, 100 to 400 μg, 100 to 500 μg, 100 to 600 μg, 100 to 700 μg, 100 to 800 μg, 100 to 900 μg, 100 to 1000 μg, 100 to 1250 μg, 100 to 1500 μg, 100 to 1750 μg, 100 to 2000 μg, 100 to 2250 μg, 100 to 2500 μg, 100 to 2750 μg, 100 to 3000 μg. 200 to 300 μg, 200 to 400 μg, 200 to 500 μg, 200 to 600 μg, 200 to 700 μg, 200 to 800 μg, 200 to 900 μg, 200 to 1000 μg. 200 to 1250 μg, 200 to 1500 μg. 200 to 1750 μg, 200 to 2000 μg, 200 to 2250 μg, 200 to 2500 μg, 200 to 2750 μg. 200 to 3000 μg, 300 to 400 μg, 300 to 500 μg, 300 to 600 μg, 300 to 700 μg, 300 to 800 μg, 300 to 900 μg, 300 to 1000 μg, 300 to 1250 μg, 300 to 1500 μg, 300 to 1750 μg, 300 to 2000 μg, 300 to 2250 μg, 300 to 2500 μg, 300 to 2750 μg, 300 to 3000 μg, 400 to 500 μg, 400 to 600 μg, 400 to 700 μg, 400 to 800 μg, 400 to 900 μg, 400 to 1000 μg, 400 to 1250 μg, 400 to 1500 μg, 400 to 1750 μg, 400 to 2000 μg, 400 to 2250 μg, 400 to 2500 μg. 400 to 2750 μg. 400 to 3000 μg. 500 to 600 μg, 500 to 700 μg, 500 to 800 μg, 500 to 900 μg, 500 to 1000 μg, 500 to 1250 μg, 500 to 1500 μg, 500 to 1750 μg, 500 to 2000 μg, 500 to 2250 μg, 500 to 2500 μg, 500 to 2750 μg, 500 to 3000 μg, 600 to 700 μg, 600 to 800 μg, 600 to 900 μg, 600 to 1000 μg, 600 to 1250 μg, 600 to 1500 μg, 600 to 1750 μg. 600 to 2000 μg, 600 to 2250 μg, 600 to 2500 μg, 600 to 2750 μg, 600 to 3000 μg, 700 to 800 μg, 700 to 900 μg, 700 to 1000 μg, 700 to 1250 μg, 700 to 1500 μg, 700 to 1750 μg, 700 to 2000 μg, 700 to 2250 μg, 700 to 2500 μg, 700 to 2750 μg, 700 to 3000 μg, 800 to 900 μg, 800 to 1000 μg, 800 to 1250 μg, 800 to 1500 μg, 800 to 1750 μg, 800 to 2000 μg, 800 to 2250 μg, 800 to 2500 μg. 800 to 2750 μg, 800 to 3000 μg, 900 to 1000 μg, 900 to 1250 μg, 900 to 1500 μg, 900 to 1750 μg, 900 to 2000 μg, 900 to 2250 μg, 900 to 2500 μg, 900 to 2750 μg, 900 to 3000 μg, 1000 to 1250 μg, 1000 to 1500 μg, 1000 to 1750 μg. 1000 to 2000 μg, 1000 to 2250 μg, 1000 to 2500 μg, 1000 to 2750 μg, 1000 to 3000 μg, 2 to 500 μg, 50 to 500 μg, 3 to 10 μg, 5 to 20 μg, 5 to 100 μg, 50 μg, 100 μg, 150 μg, 200 μg, 250 μg, 300 μg, 350 μg, 400 μg, 450 μg, 500 μg, 550 μg, 600 μg, 650 μg, 700 μg, 750 μg, 800 μg, 850 μg, 900 μg, 950 μg, 1000 μg, 1050 μg, 1100 μg, 1150 μg, 1200 μg, 1250 μg, 1300 μg, 1350 μg, 1400 μg, 1450 μg, 1500 μg, 1550 μg, 1600 μg, 1650 μg, 1700 μg, 1750 μg, 1800 μg. 1850 μg, 1900 μg, 1950 μg, 2000 μg, 2050 μg, 2100 μg, 2150 μg, 2200 μg. 2250 μg, 2300 μg, 2350 μg, 2400 μg, 2450 μg, 2500 μg, 2550 μg, 2600 μg. 2650 μg, 2700 μg, 2750 μg, 2800 μg, 2850 μg, 2900 μg, 2950 μg, 3000 μg. 3250 μg, 3500 μg, 3750 μg, 4000 μg, 4250 μg, 4500 μg, 4750 μg, 5000 μg of a peptide or agonist described herein and from 50 mg to 650 mg (e.g. 50 mg, 100 mg, 150 mg, 200 mg, 250 mg, 300 mg, 350 mg, 400 mg, 450 mg, 500 mg, 550 mg, 600 mg) of Modulon® (trimebutine maleate).

[0479] A dosage unit (e.g. an oral dosage unit) can include, for example, from 1 to 30 g, to 40 μg, 1 to 50 μg, 1 to 100 μg, to 200 μg, 1 to 300 μg, 1 to 400 μg, 1 to 500 μg, 1 to 600 μg, 1 to 700 μg, 1 to 800 μg, 1 to 900 μg, 1 to 1000 μg, 10 to 30 μg, 10 to 40 μg, 10 to 50 μg, 10 to 100 μg, 10 to 200 μg, 10 to 300 μg, 10 to 400 μg, 10 to 500 μg, 10 to 600 μg, 10 to 700 μg, 10 to 800 μg, 10 to 900 μg, 10 to 1000 μg, 100 to 200 μg, 100 to 300 μg, 100 to 400 μg, 100 to 500 μg, 100 to 600 μg, 100 to 700 μg, 100 to 800 μg, 100 to 900 μg, 100 to 1000 μg, 100 to 1250 μg, 100 to 1500 μg, 100 to 1750 μg, 100 to 2000 μg, 100 to 2250 μg, 100 to 2500 μg, 100 to 2750 μg, 100 to 3000 μg, 200 to 300 μg, 200 to 400 μg, 200 to 500 μg, 200 to 600 μg, 200 to 700 μg, 200 to 800 μg, 200 to 900 μg, 200 to 1000 μg, 200 to 1250 μg, 200 to 1500 μg, 200 to 1750 μg, 200 to 2000 μg, 200 to 2250 μg, 200 to 2500 μg, 200 to 2750 μg, 200 to 3000 μg, 300 to 400 μg, 300 to 500 μg, 300 to 600 μg, 300 to 700 μg, 300 to 800 μg, 300 to 900 μg, 300 to 1000 μg, 300 to 1250 μg, 300 to 1500 μg, 300 to 1750 μg, 300 to 2000 μg, 300 to 2250 μg, 300 to 2500 μg, 300 to 2750 μg, 300 to 3000 μg, 400 to 500 μg, 400 to 600 μg, 400 to 700 μg, 400 to 800 μg, 400 to 900 μg, 400 to 1000 μg, 400 to 1250 μg, 400 to 1500 μg, 400 to 1750 μg, 400 to 2000 μg, 400 to 2250 μg, 400 to 2500 μg, 400 to 2750 μg, 400 to 3000 μg, 500 to 600 μg, 500 to 700 μg, 500 to 800 μg, 500 to 900 μg, 500 to 1000 μg, 500 to 1250 μg, 500 to 1500 μg, 500 to 1750 μg, 500 to 2000 μg, 500 to 2250 μg, 500 to 2500 μg, 500 to 2750 μg, 500 to 3000 μg, 600 to 700 μg, 600 to 800 μg, 600 to 900 μg, 600 to 1000 μg, 600 to 1250 μg, 600 to 1500 μg, 600 to 1750 μg, 600 to 2000 μg, 600 to 2250 μg, 600 to 2500 μg, 600 to 2750 μg, 600 to 3000 μg, 700 to 800 μg, 700 to 900 μg, 700 to 1000 μg, 700 to 1250 μg, 700 to 1500 μg, 700 to 1750 μg, 700 to 2000 μg, 700 to 2250 μg, 700 to 2500 μg, 700 to 2750 μg, 700 to 3000 μg, 800 to 900 μg, 800 to 1000 μg, 800 to 1250 μg, 800 to 1500 μg, 800 to 1750 μg, 800 to 2000 μg, 800 to 2250 μg, 800 to 2500 μg, 800 to 2750 μg, 800 to 3000 μg, 900 to 1000 μg, 900 to 1250 μg, 900 to 1500 μg, 900 to 1750 μg, 900 to 2000 μg, 900 to 2250 μg, 900 to 2500 μg, 900 to 2750 μg, 900 to 3000 μg, 1000 to 1250 μg, 1000 to 1500 μg, 1000 to 1750 μg, 1000 to 2000 μg, 1000 to 2250 μg, 1000 to 2500 μg, 1000 to 2750 μg, 1000 to 3000 μg, 2 to 500 μg, 50 to 500 μg, 3 to 100 μg, 5 to 20 μg, 5 to 100 μg, 50 μg, 100 μg, 150 μg, 200 μg, 250 μg, 300 μg, 350 μg, 400 μg, 450 μg, 500 μg, 550 μg, 600 μg, 650 μg, 700 μg, 750 μg, 800 μg, 850 μg, 900 μg, 950 μg, 1000 μg, 1050 μg, 1100 μg, 1150 μg, 1200 μg, 1250 μg, 1300 μg, 1350 μg, 1400 μg, 1450 μg, 1500 μg, 1550 μg, 1600 μg, 1650 μg, 1700 μg, 1750 μg, 1800 μg, 1850 μg, 1900 μg, 1950 μg, 2000 μg, 2050 μg, 2100 μg, 2150 μg, 2200 μg, 2250 μg, 2300 μg, 2350 μg, 2400 μg, 2450 μg, 2500 μg, 2550 μg, 2600 μg, 2650 μg, 2700 μg, 2750 μg, 2800 μg, 2850 μg, 2900 μg, 2950 μg, 3000 μg, 3250 μg, 3500 μg, 3750 μg, 4000 μg, 4250 μg, 4500 μg, 4750 μg, 5000 μg of a peptide or agonist described herein and from 1 mg to 80 mg (e.g. 1 mg, 5 mg, 10 mg, 15 mg, 20 mg, 25 mg, 30 mg, 35 mg, 40 mg, 45 mg, 50 mg, 55 mg, 60 mg, 65 mg, 70 mg, 75 mg, 80 mg) of Propulsid® (cisapride).

[0480] A dosage unit (e.g. an oral dosage unit) can include, for example, from 1 to 30 μg, to 40 μg, 1 to 50 μg, 1 to 100 μg, to 200 μg, 1 to 300 μg, 1 to 400 μg, 1 to 500 μg, 1 to 600 μg, 1 to 700 μg, 1 to 800 μg, 1 to 900 μg, 1 to 1000 μg, 10 to 30 μg, 10 to 40 μg, 10 to 50 μg, 10 to 100 μg, 10 to 200 μg, 10 to 300 μg, 10 to 400 μg, 10 to 500 μg, 10 to 600 μg, 10 to 700 μg, 10 to 800 μg, 10 to 900 μg, 10 to 1000 μg, 100 to 200 μg, 100 to 300 μg, 100 to 400 μg, 100 to 500 μg, 100 to 600 μg, 100 to 700 μg, 100 to 800 μg, 100 to 900 μg, 100 to 1000 μg, 100 to 1250 μg, 100 to 1500 μg, 100 to 1750 μg, 100 to 2000 μg, 100 to 2250 μg, 100 to 2500 μg, 100 to 2750 μg, 100 to 3000 μg, 200 to 300 μg, 200 to 400 μg, 200 to 500 μg, 200 to 600 μg, 200 to 700 μg, 200 to 800 μg, 200 to 900 μg, 200 to 1000 μg, 200 to 1250 μg, 200 to 1500 μg, 200 to 1750 μg, 200 to 2000 μg, 200 to 2250 μg, 200 to 2500 μg, 200 to 27501 μg, 200 to 3000 μg, 300 to 400 μg, 300 to 500 μg, 300 to 600 μg, 300 to 700 μg, 300 to 800 μg, 300 to 900 μg, 300 to 1000 μg, 300 to 1250 μg, 300 to 1500 μg, 300 to 1750 μg, 300 to 2000 μg, 300 to 22501 μg, 300 to 2500 μg, 300 to 2750 μg, 300 to 3000 μg, 400 to 500 μg, 400 to 600 μg, 400 to 700 μg, 400 to 800 μg, 400 to 900 μg, 400 to 1000 μg, 400 to 1250 μg, 400 to 1500 μg, 400 to 1750 μg, 400 to 2000 μg, 400 to 2250 μg, 400 to 2500 μg, 400 to 27501 μg, 400 to 3000 μg, 500 to 600 μg, 500 to 700 μg, 500 to 800 μg, 500 to 900 μg, 500 to 1000 μg, 500 to 1250 μg, 500 to 1500 μg, 500 to 1750 μg, 500 to 2000 μg, 500 to 2250 μg, 500 to 2500 μg, 500 to 27501 μg, 500 to 3000 μg, 600 to 700 μg, 600 to 800 μg, 600 to 900 μg, 600 to 1000 μg, 600 to 1250 μg, 600 to 1500 μg, 600 to 1750 μg, 600 to 2000 μg, 600 to 2250 μg, 600 to 2500 μg, 600 to 2750 μg, 600 to 3000 μg, 700 to 800 μg, 700 to 900 μg, 700 to 1000 μg, 700 to 1250 μg, 700 to 1500 μg, 700 to 1750 μg, 700 to 2000 μg, 700 to 2250 μg, 700 to 2500 μg, 700 to 2750 μg, 700 to 3000 μg, 800 to 900 μg, 800 to 1000 μg, 800 to 1250 μg, 800 to 1500 μg, 800 to 17501 μg, 800 to 2000 μg, 800 to 2250 μg, 800 to 2500 μg, 800 to 2750 μg, 800 to 3000 μg, 900 to 1000 μg, 900 to 1250 μg, 900 to 1500 μg, 900 to 1750 μg, 900 to 2000 μg, 900 to 2250 μg, 900 to 2500 μg, 900 to 2750 μg, 900 to 3000 μg, 1000 to 1250 μg, 1000 to 1500 μg, 1000 to 1750 μg, 1000 to 2000 μg, 1000 to 2250 μg, 1000 to 2500 μg, 1000 to 2750 μg, 1000 to 3000 μg, 2 to 500 μg, 50 to 500 μg, 3 to 100 μg, 5 to 20 μg, 5 to 100 μg, 50 μg, 100 μg, 150 μg, 200 μg, 250 μg, 300 μg, 350 μg, 400 μg, 450 μg, 500 μg, 550 μg, 600 μg, 650 μg, 700 μg, 750 μg, 800 μg, 850 μg, 900 μg, 950 μg, 1000 μg, 1050 μg, 1100 μg, 1150 μg, 1200 μg, 1250 μg, 1300 μg, 1350 μg, 1400 μg, 1450 μg, 1500 μg, 1550 μg, 1600 μg, 1650 μg, 1700 μg, 1750 μg, 1800 μg, 1850 μg, 1900 μg, 1950 μg, 2000 μg, 2050 μg, 2100 μg, 2150 μg, 2200 μg, 2250 μg, 2300 μg, 2350 μg, 2400 μg, 2450 μg, 2500 μg, 2550 μg, 2600 μg, 2650 μg, 2700 μg, 2750 μg, 2800 μg, 2850 μg, 2900 μg, 2950 μg, 3000 μg, 3250 μg, 3500 μg, 3750 μg, 4000 μg, 4250 μg, 4500 μg, 4750 μg, 5000 μg of a peptide or agonist described herein and from 10 mg to 600 mg (e.g. 10 mg, 20 mg, 30 mg, 40 mg, 50 mg, 60 mg, 70 mg, 80 mg, 90 mg, 100 mg, 110 mg, 120 mg, 130 mg, 140 mg, 150 mg, 160 mg, 200 mg, 250 mg, 300 mg, 350 mg, 400 mg, 450 mg, 500 mg, 550 mg, 600 mg) of Bentyl®/Bentylol® (diciclomine).

[0481] A dosage unit (e.g. an oral dosage unit) can include, for example, from 1 to 30 μg, to 40 μg, 1 to 50 μg, 1 to 100 μg, to 200 μg, 1 to 300 μg, 1 to 400 μg, 1 to 500 μg, 1 to 600 μg, 1 to 700 μg, 1 to 800 μg, 1 to 900 μg, 1 to 1000 μg, 10 to 30 μg, 10 to 40 μg, 10 to 50 μg, 10 to 100 μg, 10 to 200 μg, 10 to 300 μg, 10 to 400 μg, 10 to 500 μg, 10 to 600 μg, 10 to 700 μg, 10 to 800 μg, 10 to 900 μg, 10 to 1000 μg, 100 to 200 μg, 100 to 300 μg, 100 to 400 μg, 100 to 500 μg, 100 to 600 μg, 100 to 700 μg, 100 to 800 μg, 100 to 900 μg, 100 to 1000 μg, 100 to 1250 μg, 100 to 1500 μg, 100 to 1750 μg, 100 to 2000 μg, 100 to 2250 μg, 100 to 2500 μg, 100 to 2750 μg, 100 to 3000 μg, 200 to 300 μg, 200 to 400 μg, 200 to 500 μg, 200 to 600 μg, 200 to 700 μg, 200 to 800 μg, 200 to 900 μg, 200 to 1000 μg, 200 to 1250 μg, 200 to 1500 μg, 200 to 1750 μg, 200 to 2000 μg, 200 to 2250 μg, 200 to 2500 μg, 200 to 27501 μg, 200 to 3000 μg, 300 to 400 μg, 300 to 500 μg, 300 to 600 μg, 300 to 700 μg, 300 to 800 μg, 300 to 900 μg, 300 to 1000 μg, 300 to 1250 μg, 300 to 1500 μg, 300 to 1750 μg, 300 to 2000 μg, 300 to 22501 μg, 300 to 2500 μg, 300 to 2750 μg, 300 to 3000 μg, 400 to 500 μg, 400 to 600 μg, 400 to 700 μg, 400 to 800 μg, 400 to 900 μg, 400 to 1000 μg, 400 to 1250 μg, 400 to 1500 μg, 400 to 1750 μg, 400 to 2000 μg, 400 to 2250 μg, 400 to 2500 μg, 400 to 27501 μg, 400 to 3000 μg, 500 to 600 μg, 500 to 700 μg, 500 to 800 μg, 500 to 900 μg, 500 to 1000 μg, 500 to 1250 μg, 500 to 1500 μg, 500 to 1750 μg, 500 to 2000 μg, 500 to 2250 μg, 500 to 2500 μg, 500 to 2750 μg, 500 to 3000 μg, 600 to 700 μg, 600 to 800 μg, 600 to 900 μg, 600 to 1000 μg, 600 to 1250 μg, 600 to 1500 μg, 600 to 1750 μg, 600 to 2000 μg, 600 to 2250 μg, 600 to 2500 μg, 600 to 2750 μg, 600 to 3000 μg, 700 to 800 μg, 700 to 900 μg, 700 to 1000 μg, 700 to 1250 μg, 700 to 1500 μg, 700 to 1750 μg, 700 to 2000 μg, 700 to 2250 μg, 700 to 2500 μg, 700 to 2750 μg, 700 to 3000 μg, 800 to 900 μg, 800 to 1000 μg, 800 to 1250 μg, 800 to 1500 μg, 800 to 1750 μg, 800 to 2000 μg, 800 to 2250 μg, 800 to 2500 μg, 800 to 2750 μg, 800 to 3000 μg, 900 to 1000 μg, 900 to 1250 μg, 900 to 1500 μg, 900 to 1750 μg, 900 to 2000 μg, 900 to 2250 μg, 900 to 2500 μg, 900 to 2750 μg, 900 to 3000 μg, 1000 to 1250 μg, 1000 to 1500 μg, 1000 to 1750 μg, 1000 to 2000 μg, 1000 to 2250 μg, 1000 to 2500 μg, 1000 to 2750 μg, 1000 to 3000 μg, 2 to 500 μg, 50 to 500 μg, 3 to 10 μg, 5 to 20 μg, 5 to 100 μg, 50 μg, 100 μg, 150 μg, 200 μg, 250 μg, 300 μg, 350 μg, 400 μg, 450 μg, 500 μg, 550 μg, 600 μg, 650 μg, 700 μg, 750 μg, 800 μg, 850 μg, 900 μg, 950 μg, 1000 μg, 1050 μg, 1100 μg, 1150 μg, 1200 μg, 1250 μg, 1300 μg, 1350 μg, 1400 μg, 1450 μg, 1500 μg, 1550 μg, 1600 μg, 1650 μg, 1700 μg, 1750 μg, 1800 μg, 1850 μg, 1900 μg, 1950 μg, 2000 μg, 2050 μg, 2100 μg, 2150 μg, 2200 μg, 2250 μg, 2300 μg, 2350 μg, 2400 μg, 2450 μg, 2500 μg, 2550 μg, 2600 μg, 2650 μg, 2700 μg, 2750 μg, 2800 μg, 2850 μg, 2900 μg, 2950 μg, 3000 μg, 3250 μg, 3500 μg, 3750 μg, 4000 μg, 4250 μg, 4500 μg, 4750 μg, 5000 μg of a peptide or agonist described herein and from 1 mg to 25 mg (e.g. 1 mg, 2 mg, 3 mg, 4 mg, 5 mg, 6 mg, 7 mg, 8 mg, 9 mg, 10 mg, 11 mg, 12 mg, 13 mg, 14 mg, 15 mg, 16 mg, 17 mg, 18 mg, 19 mg, 20 mg, 21 mg, 22 mg, 23 mg, 24 mg, 25 mg) of Questran® (cholestyramine).

[0482] A dosage unit (e.g. an oral dosage unit) can include, for example, from 1 to 30 μg, to 40 μg, 1 to 50 μg, 1 to 100 μg, to 200 μg, 1 to 300 μg, 1 to 400 μg, 1 to 500 μg, 1 to 600 μg, 1 to 700 μg, 1 to 800 μg, 1 to 900 μg, 1 to 1000 μg, 10 to 30 μg, 10 to 40 μg, 10 to 50 μg, 10 to 100 μg, 10 to 200 μg, 10 to 300 μg, 10 to 400 μg, 10 to 500 μg, 10 to 600 μg, 10 to 700 μg, 10 to 800 μg, 10 to 900 μg, 10 to 1000 μg, 100 to 200 μg, 100 to 300 μg, 100 to 400 μg, 100 to 500 μg, 100 to 600 μg, 100 to 700 μg, 100 to 800 μg, 100 to 900 μg, 100 to 1000 μg, 100 to 1250 μg, 100 to 1500 μg, 100 to 1750 μg, 100 to 2000 μg, 100 to 2250 μg, 100 to 2500 μg, 100 to 2750 μg, 100 to 3000 μg, 200 to 300 μg, 200 to 400 μg, 200 to 500 μg, 200 to 600 μg, 200 to 700 μg, 200 to 800 μg, 200 to 900 μg, 200 to 1000 μg, 200 to 1250 μg, 200 to 1500 μg, 200 to 1750 μg, 200 to 2000 μg, 200 to 2250 μg, 200 to 2500 μg, 200 to 27501 μg, 200 to 3000 μg, 300 to 400 μg, 300 to 500 μg, 300 to 600 μg, 300 to 700 μg, 300 to 800 μg, 300 to 900 μg, 300 to 1000 μg, 300 to 1250 μg, 300 to 1500 μg, 300 to 1750 μg, 300 to 2000 μg, 300 to 22501 μg, 300 to 2500 μg, 300 to 2750 μg, 300 to 3000 μg, 400 to 500 μg, 400 to 600 μg, 400 to 700 μg, 400 to 800 μg, 400 to 900 μg, 400 to 1000 μg, 400 to 1250 μg, 400 to 1500 μg, 400 to 1750 μg, 400 to 2000 μg, 400 to 2250 μg, 400 to 2500 μg, 400 to 27501 μg, 400 to 3000 μg, 500 to 600 μg, 500 to 700 μg, 500 to 800 μg, 500 to 900 μg, 500 to 1000 μg, 500 to 1250 μg, 500 to 1500 μg, 500 to 1750 μg, 500 to 2000 μg, 500 to 2250 μg, 500 to 2500 μg, 500 to 27501 μg, 500 to 3000 μg, 600 to 700 μg, 600 to 800 μg, 600 to 900 μg, 600 to 1000 μg, 600 to 1250 μg, 600 to 1500 μg, 600 to 1750 μg, 600 to 2000 μg, 600 to 2250 μg, 600 to 2500 μg, 600 to 2750 μg, 600 to 3000 μg, 700 to 800 μg, 700 to 900 μg, 700 to 1000 μg, 700 to 1250 μg, 700 to 1500 μg, 700 to 1750 μg, 700 to 2000 μg, 700 to 2250 μg, 700 to 2500 μg, 700 to 2750 μg, 700 to 3000 μg, 800 to 900 μg, 800 to 1000 μg, 800 to 1250 μg, 800 to 1500 μg, 800 to 17501 μg, 800 to 2000 μg, 800 to 2250 μg, 800 to 2500 μg, 800 to 2750 μg, 800 to 3000 μg, 900 to 1000 μg, 900 to 1250 μg, 900 to 1500 μg, 900 to 1750 μg, 900 to 2000 μg, 900 to 2250 μg, 900 to 2500 μg, 900 to 2750 μg, 900 to 3000 μg, 1000 to 1250 μg, 1000 to 1500 μg, 1000 to 1750 μg, 1000 to 2000 μg, 1000 to 2250 μg, 1000 to 2500 μg, 1000 to 2750 μg, 1000 to 3000 μg, 2 to 500 μg, 50 to 500 μg, 3 to 100 μg, 5 to 20 μg, 5 to 100 μg, 50 μg, 100 μg, 150 μg, 200 μg, 250 μg, 300 μg, 350 μg, 400 μg, 450 μg, 500 μg, 550 μg, 600 μg, 650 μg, 700 μg, 750 μg, 800 μg, 850 μg, 900 μg, 950 μg, 1000 μg, 1050 μg, 1100 μg, 1150 μg, 1200 μg, 1250 μg, 1300 μg, 1350 μg, 1400 μg, 1450 μg, 1500 μg, 1550 μg, 1600 μg, 1650 μg, 1700 μg, 1750 μg, 1800 μg, 1850 μg, 1900 μg, 1950 μg, 2000 μg, 2050 μg, 2100 μg, 2150 μg, 2200 μg, 2250 μg, 2300 μg, 2350 μg, 2400 μg, 2450 μg, 2500 μg, 2550 μg, 2600 μg, 2650 μg, 2700 μg, 2750 μg, 2800 μg, 2850 μg, 2900 μg, 2950 μg, 3000 μg, 3250 μg, 3500 μg, 3750 μg, 4000 μg, 4250 μg, 4500 μg, 4750 μg, 5000 μg of a peptide or agonist described herein and from 100 mg to 3000 mg (e.g. 100 mg, 200 mg, 300 mg, 400 mg, 500 mg, 600 mg, 625 mg, 700 mg, 800 mg, 900 mg, 1000 mg, 1250 mg, 1300 mg, 1400 mg, 1500 mg, 1600 mg, 1700 mg, 1800 mg, 1875 mg, 1900 mg, 2000 mg, 2100 mg, 2200 mg, 2300 mg, 2400 mg, 2500 mg) of Equalactin®/Fibercon® (Calcium Polycarbophil).

[0483] A dosage unit (e.g. an oral dosage unit) can include, for example, from 1 to 30 g, to 40 μg, 1 to 50 μg, 1 to 100 μg, to 200 μg, 1 to 300 μg, 1 to 400 μg, 1 to 500 μg, 1 to 600 μg, 1 to 700 μg, 1 to 800 μg, 1 to 900 μg, 1 to 1000 μg, 10 to 30 μg, 10 to 40 μg, 10 to 50 μg, 10 to 100 μg, 10 to 200 μg, 10 to 300 μg, 10 to 400 μg, 10 to 500 μg, 10 to 600 μg, 10 to 700 μg, 10 to 800 μg, 10 to 900 μg, 10 to 1000 μg, 100 to 200 μg, 100 to 300 μg, 100 to 400 μg, 100 to 500 μg, 100 to 600 μg, 100 to 700 μg, 100 to 800 μg, 100 to 900 μg, 100 to 1000 μg, 100 to 1250 μg, 100 to 1500 μg, 100 to 1750 μg, 100 to 2000 μg, 100 to 2250 μg, 100 to 2500 μg, 100 to 2750 μg, 100 to 3000 μg, 200 to 300 μg, 200 to 400 μg, 200 to 500 μg, 200 to 600 μg, 200 to 700 μg, 200 to 800 μg, 200 to 900 μg, 200 to 1000 μg, 200 to 1250 μg, 200 to 1500 μg, 200 to 1750 μg, 200 to 2000 μg, 200 to 2250 μg, 200 to 2500 μg, 200 to 27501 μg, 200 to 3000 μg, 300 to 400 μg, 300 to 500 μg, 300 to 600 μg, 300 to 700 μg, 300 to 800 μg, 300 to 900 μg, 300 to 1000 μg, 300 to 1250 μg, 300 to 1500 μg, 300 to 1750 μg, 300 to 2000 μg, 300 to 22501 μg, 300 to 2500 μg, 300 to 2750 μg, 300 to 3000 μg, 400 to 500 μg, 400 to 600 μg, 400 to 700 μg, 400 to 800 μg, 400 to 900 μg, 400 to 1000 μg, 400 to 1250 μg, 400 to 1500 μg, 400 to 1750 μg, 400 to 2000 μg, 400 to 2250 μg, 400 to 2500 μg, 400 to 27501 μg, 400 to 3000 μg, 500 to 600 μg, 500 to 700 μg, 500 to 800 μg, 500 to 900 μg, 500 to 1000 μg, 500 to 1250 μg, 500 to 1500 μg, 500 to 1750 μg, 500 to 2000 μg, 500 to 2250 μg, 500 to 2500 μg, 500 to 27501 μg, 500 to 3000 μg, 600 to 700 μg, 600 to 800 μg, 600 to 900 μg, 600 to 1000 μg, 600 to 1250 μg, 600 to 1500 μg, 600 to 1750 μg, 600 to 2000 μg, 600 to 2250 μg, 600 to 2500 μg, 600 to 2750 μg, 600 to 3000 μg, 700 to 800 μg, 700 to 900 μg, 700 to 1000 μg, 700 to 1250 μg, 700 to 1500 μg, 700 to 1750 μg, 700 to 2000 μg, 700 to 2250 μg, 700 to 2500 μg, 700 to 2750 μg, 700 to 3000 μg, 800 to 900 μg, 800 to 1000 μg, 800 to 1250 μg, 800 to 1500 μg, 800 to 1750 μg, 800 to 2000 μg, 800 to 2250 μg, 800 to 2500 μg, 800 to 2750 μg, 800 to 3000 μg, 900 to 1000 μg, 900 to 1250 μg, 900 to 1500 μg, 900 to 1750 μg, 900 to 2000 μg, 900 to 2250 μg, 900 to 2500 μg, 900 to 2750 μg, 900 to 3000 μg, 1000 to 1250 μg, 1000 to 1500 μg, 1000 to 1750 μg, 1000 to 2000 μg, 1000 to 2250 μg, 1000 to 2500 μg, 1000 to 2750 μg, 1000 to 3000 μg, 2 to 500 μg, 50 to 500 μg, 3 to 100 μg, 5 to 20 μg, 5 to 100 μg, 50 μg, 100 μg, 150 μg, 200 μg, 250 μg, 300 μg, 350 μg, 400 μg, 450 μg, 500 μg, 550 μg, 600 μg, 650 μg, 700 μg, 750 μg, 800 μg, 850 μg, 900 μg, 950 μg, 1000 μg. 1050 μg, 1100 μg, 1150 μg, 1200 μg, 1250 μg, 1300 μg, 1350 μg, 1400 μg, 1450 μg, 1500 μg, 1550 μg, 1600 μg, 1650 μg, 1700 μg, 1750 μg, 1800 μg, 1850 μg, 1900 μg, 1950 μg, 2000 μg, 2050 μg, 2100 μg, 2150 μg, 2200 μg, 2250 μg, 2300 μg, 2350 μg, 2400 μg, 2450 μg, 2500 μg, 2550 μg, 2600 μg, 2650 μg, 2700 μg, 2750 μg, 2800 μg, 2850 μg, 2900 μg, 2950 μg, 3000 μg, 3250 μg, 3500 μg, 3750 μg, 4000 μg, 4250 μg, 4500 μg, 4750 μg, 5000 μg of a peptide or agonist described herein and from 1 mg to 20 mg (e.g. 1 mg, 2 mg, 2.5 mg, 3 mg, 4 mg, 5 mg, 6 mg, 7 mg, 7.5 mg, 8 mg, 9 mg, 10 mg, 11 mg, 12 mg, 12.5 mg, 13 mg, 14 mg, 15 mg, 16 mg, 17.5 mg, 18 mg, 19 mg, 20 mg) of darifenacin (Enablex®).

[0484] A dosage unit (e.g. an oral dosage unit) can include, for example, from 1 to 30 μg, to 40 μg, 1 to 50 μg, 1 to 100 μg, to 200 μg, 1 to 300 μg, 1 to 400 μg, 1 to 500 μg, 1 to 600 μg, 1 to 700 μg, 1 to 800 μg, 1 to 900 μg, 1 to 1000 μg, 10 to 30 μg, 10 to 40 μg, 10 to 50 μg, 10 to 100 μg, 10 to 200 μg, 10 to 300 μg, 10 to 400 μg, 10 to 500 μg, 10 to 600 μg, 10 to 700 μg, 10 to 800 μg, 10 to 900 μg, 10 to 1000 μg, 100 to 200 μg, 100 to 300 μg, 100 to 400 μg, 100 to 500 μg, 100 to 600 μg, 100 to 700 μg, 100 to 800 μg, 100 to 900 μg, 100 to 1000 μg, 100 to 1250 μg, 100 to 1500 μg, 100 to 1750 μg, 100 to 2000 μg, 100 to 2250 μg, 100 to 2500 μg, 100 to 2750 μg, 100 to 3000 μg, 200 to 300 μg, 200 to 400 μg, 200 to 500 μg, 200 to 600 μg, 200 to 700 μg, 200 to 800 μg, 200 to 900 μg, 200 to 1000 μg, 200 to 1250 μg, 200 to 1500 μg, 200 to 1750 μg, 200 to 2000 μg, 200 to 2250 μg, 200 to 2500 μg, 200 to 27501 μg, 200 to 3000 μg, 300 to 400 μg, 300 to 500 μg, 300 to 600 μg, 300 to 700 μg, 300 to 800 μg, 300 to 900 μg, 300 to 1000 μg, 300 to 1250 μg, 300 to 1500 μg, 300 to 1750 μg, 300 to 2000 μg, 300 to 22501 μg, 300 to 2500 μg, 300 to 2750 μg, 300 to 3000 μg, 400 to 500 μg, 400 to 600 μg, 400 to 700 μg, 400 to 800 μg, 400 to 900 μg, 400 to 1000 μg, 400 to 1250 μg, 400 to 1500 μg, 400 to 1750 μg, 400 to 2000 μg, 400 to 2250 μg, 400 to 2500 μg, 400 to 27501 μg, 400 to 3000 μg, 500 to 600 μg, 500 to 700 μg, 500 to 800 μg, 500 to 900 μg, 500 to 1000 μg, 500 to 1250 μg, 500 to 1500 μg, 500 to 1750 μg, 500 to 2000 μg, 500 to 2250 μg, 500 to 2500 μg, 500 to 2750 μg, 500 to 3000 μg, 600 to 700 μg, 600 to 800 μg, 600 to 900 μg, 600 to 1000 μg, 600 to 1250 μg, 600 to 1500 μg, 600 to 1750 μg, 600 to 2000 μg, 600 to 2250 μg, 600 to 2500 μg, 600 to 2750 μg, 600 to 3000 μg, 700 to 800 μg, 700 to 900 μg, 700 to 1000 μg, 700 to 1250 μg, 700 to 1500 μg, 700 to 1750 μg, 700 to 2000 μg, 700 to 2250 μg, 700 to 2500 μg, 700 to 2750 μg, 700 to 3000 μg, 800 to 900 μg, 800 to 1000 μg, 800 to 1250 μg, 800 to 1500 μg, 800 to 1750 μg, 800 to 2000 μg, 800 to 2250 μg, 800 to 2500 μg, 800 to 2750 μg, 800 to 3000 μg, 900 to 1000 μg, 900 to 1250 μg, 900 to 1500 μg, 900 to 1750 μg, 900 to 2000 μg, 900 to 2250 μg, 900 to 2500 μg, 900 to 2750 μg, 900 to 3000 μg, 1000 to 1250 μg, 1000 to 1500 μg, 1000 to 1750 μg, 1000 to 2000 μg, 1000 to 2250 μg, 1000 to 2500 μg, 1000 to 2750 μg, 1000 to 3000 μg, 2 to 500 μg, 50 to 500 μg, 3 to 100 μg, 5 to 20 μg, 5 to 100 μg, 50 μg, 100 μg, 150 μg, 200 μg, 250 μg, 300 μg, 350 μg, 400 μg, 450 μg, 500 μg, 550 μg, 600 μg, 650 μg, 700 μg, 750 μg, 800 μg, 850 μg, 900 μg, 950 μg, 1000 μg, 1050 μg, 1100 μg, 1150 μg, 1200 μg, 1250 μg, 1300 μg, 1350 μg, 1400 μg, 1450 μg, 1500 μg, 1550 μg, 1600 μg, 1650 μg, 1700 μg, 1750 μg, 1800 μg, 1850 μg, 1900 μg, 1950 μg, 2000 μg, 2050 μg, 2100 μg, 2150 μg, 2200 μg, 2250 μg, 2300 μg, 2350 μg, 2400 μg, 2450 μg, 2500 μg, 2550 μg, 2600 μg, 2650 μg, 2700 μg, 2750 μg, 2800 μg, 2850 μg, 2900 μg, 2950 μg, 3000 μg, 3250 μg, 3500 μg, 3750 μg, 4000 μg, 4250 μg, 4500 μg, 4750 μg, 5000 μg of a peptide or agonist described herein and from 1 mg to 250 mg (e.g. 1 mg, 2 mg, 3 mg, 4 mg, 5 mg, 6 mg, 7 mg, 8 mg, 9 mg, 10 mg, 20 mg, 30 mg, 40 mg, 50 mg, 60 mg, 70 mg, 80 mg, 90 mg, 100 mg, 110 mg, 120 mg, 130 mg, 140 mg, 150 mg, 160 mg, 170 mg, 180 mg, 190 mg, 200 mg, 210 mg, 220 mg, 230 mg, 240 mg, 250 mg) of Ondansetron HCl (Zofran®).

[0485] A dosage unit (e.g. an oral dosage unit) can include, for example, from 1 to 30 μg, to 40 μg, 1 to 50 μg, 1 to 100 μg, to 200 μg, 1 to 300 μg, 1 to 400 μg, 1 to 500 μg, 1 to 600 μg, 1 to 700 μg, 1 to 800 μg, 1 to 900 μg, 1 to 1000 μg, 10 to 30 μg, 10 to 40 μg, 10 to 50 μg, 10 to 100 μg, 10 to 200 μg, 10 to 300 μg, 10 to 400 μg, 10 to 500 μg, 10 to 600 μg, 10 to 700 μg, 10 to 800 μg, 10 to 900 μg, 10 to 1000 μg, 100 to 200 μg, 100 to 300 μg, 100 to 400 μg, 100 to 500 μg, 100 to 600 μg, 100 to 700 μg, 100 to 800 μg, 100 to 900 μg, 100 to 1000 μg, 100 to 1250 μg, 100 to 1500 μg, 100 to 1750 μg, 100 to 2000 μg, 100 to 2250 μg, 100 to 2500 μg, 100 to 2750 μg, 100 to 3000 μg, 200 to 300 μg, 200 to 400 μg, 200 to 500 μg, 200 to 600 μg, 200 to 700 μg, 200 to 800 μg, 200 to 900 μg, 200 to 1000 μg, 200 to 1250 μg, 200 to 1500 μg, 200 to 1750 μg, 200 to 2000 μg, 200 to 2250 μg, 200 to 2500 μg, 200 to 27501 μg, 200 to 3000 μg, 300 to 400 μg, 300 to 500 μg, 300 to 600 μg, 300 to 700 μg, 300 to 800 μg, 300 to 900 μg, 300 to 1000 μg, 300 to 1250 μg, 300 to 1500 μg, 300 to 1750 μg, 300 to 2000 μg, 300 to 22501 μg, 300 to 2500 μg, 300 to 2750 μg, 300 to 3000 μg, 400 to 500 μg, 400 to 600 μg, 400 to 700 μg, 400 to 800 μg, 400 to 900 μg, 400 to 1000 μg, 400 to 1250 μg, 400 to 1500 μg, 400 to 1750 μg, 400 to 2000 μg, 400 to 2250 μg, 400 to 2500 μg, 400 to 27501 μg, 400 to 3000 μg, 500 to 600 μg, 500 to 700 μg, 500 to 800 μg, 500 to 900 μg, 500 to 1000 μg, 500 to 1250 μg, 500 to 1500 μg, 500 to 1750 μg, 500 to 2000 μg, 500 to 2250 μg, 500 to 2500 μg, 500 to 27501 μg, 500 to 3000 μg, 600 to 700 μg, 600 to 800 μg, 600 to 900 μg, 600 to 1000 μg, 600 to 1250 μg, 600 to 1500 μg, 600 to 1750 μg, 600 to 2000 μg, 600 to 2250 μg, 600 to 2500 μg, 600 to 2750 μg, 600 to 3000 μg, 700 to 800 μg, 700 to 900 μg, 700 to 1000 μg, 700 to 1250 μg, 700 to 1500 μg, 700 to 1750 μg, 700 to 2000 μg, 700 to 2250 μg, 700 to 2500 μg, 700 to 2750 μg, 700 to 3000 μg, 800 to 900 μg, 800 to 1000 μg, 800 to 1250 μg, 800 to 1500 μg, 800 to 1750 μg, 800 to 2000 μg, 800 to 2250 μg, 800 to 2500 μg, 800 to 2750 μg, 800 to 3000 μg, 900 to 1000 μg, 900 to 1250 μg, 900 to 1500 μg. 900 to 1750 μg, 900 to 2000 μg, 900 to 2250 μg, 900 to 2500 μg, 900 to 2750 μg, 900 to 3000 μg, 1000 to 1250 μg, 1000 to 1500 μg, 1000 to 1750 μg, 1000 to 2000 μg, 1000 to 2250 μg, 1000 to 2500 μg, 1000 to 2750 μg, 1000 to 3000 μg, 2 to 500 μg, 50 to 500 μg, 3 to 10 μg, 5 to 20 μg, 5 to 100 μg, 50 μg, 100 μg, 150 μg, 200 μg, 250 μg, 300 μg, 350 μg, 400 μg, 450 μg, 500 μg, 550 μg, 600 μg, 650 μg, 700 μg, 750 μg, 800 μg, 850 μg, 900 μg, 950 μg, 1000 μg, 1050 μg, 1100 μg, 1150 μg, 1200 μg, 1250 μg, 1300 μg, 1350 μg, 1400 μg, 1450 μg, 1500 μg, 1550 μg, 1600 μg, 1650 μg, 1700 μg, 1750 μg, 1800 μg, 1850 μg, 1900 μg, 1950 μg, 2000 μg, 2050 μg, 2100 μg, 2150 μg, 2200 μg, 2250 μg, 2300 μg, 2350 μg, 2400 μg, 2450 μg, 2500 μg, 2550 μg, 2600 μg, 2650 μg, 2700 μg, 2750 μg, 2800 μg, 2850 μg, 2900 μg, 2950 μg, 3000 μg, 3250 μg, 3500 μg, 3750 μg, 4000 μg, 4250 μg, 4500 μg, 4750 μg, 5000 μg of a peptide or agonist described herein and from 1 mg to 3000 mg (e.g. 1 mg, 2 mg, 3 mg, 4 mg, 5 mg, 6 mg, 7 mg, 8 mg, 9 mg, 10 mg, 20 mg, 30 mg, 40 mg, 50 mg, 60 mg, 70 mg, 80 mg, 90 mg, 100 mg, 200 mg, 250 mg, 300 mg, 350 mg, 400 mg, 450 mg, 500 mg, 750 mg, 1000 mg, 1250 mg, 1500 mg, 1750 mg, 2000 mg, 2250 mg, 2500 mg, 2750 mg, 3000 mg) of Cimetropium (Alginor®).

[0486] A dosage unit (e.g. an oral dosage unit) can include, for example, from 1 to 30 g, to 40 μg, 1 to 50 μg, 1 to 100 μg, to 200 μg, 1 to 300 μg, 1 to 400 μg, 1 to 500 μg, 1 to 600 μg, 1 to 700 μg, 1 to 800 μg, 1 to 900 μg, 1 to 1000 μg, 10 to 30 μg, 10 to 40 μg, 10 to 50 μg, 10 to 100 μg, 10 to 200 μg, 10 to 300 μg, 10 to 400 μg, 10 to 500 μg, 10 to 600 μg, 10 to 700 μg, 10 to 800 μg, 10 to 900 μg, 10 to 1000 μg, 100 to 200 μg, 100 to 300 μg, 100 to 400 μg, 100 to 500 μg, 100 to 600 μg, 100 to 700 μg, 100 to 800 μg, 100 to 900 μg, 100 to 1000 μg, 100 to 1250 μg, 100 to 1500 μg, 100 to 1750 μg, 100 to 2000 μg, 100 to 2250 μg, 100 to 2500 μg, 100 to 2750 μg, 100 to 3000 μg, 200 to 300 μg, 200 to 400 μg, 200 to 500 μg, 200 to 600 μg, 200 to 700 μg, 200 to 800 μg, 200 to 900 μg, 200 to 1000 μg, 200 to 1250 μg, 200 to 1500 μg, 200 to 1750 μg, 200 to 2000 μg, 200 to 2250 μg, 200 to 2500 μg, 200 to 27501 μg, 200 to 3000 μg, 300 to 400 μg, 300 to 500 μg, 300 to 600 μg, 300 to 700 μg, 300 to 800 μg, 300 to 900 μg, 300 to 1000 μg, 300 to 1250 μg, 300 to 1500 μg, 300 to 1750 μg, 300 to 2000 μg, 300 to 22501 μg, 300 to 2500 μg, 300 to 2750 μg, 300 to 3000 μg, 400 to 500 μg, 400 to 600 μg, 400 to 700 μg, 400 to 800 μg, 400 to 900 μg, 400 to 1000 μg, 400 to 1250 μg, 400 to 1500 μg, 400 to 1750 μg, 400 to 2000 μg, 400 to 2250 μg, 400 to 2500 μg, 400 to 27501 μg, 400 to 3000 μg, 500 to 600 μg, 500 to 700 μg, 500 to 800 μg, 500 to 900 μg, 500 to 1000 μg, 500 to 1250 μg, 500 to 1500 μg, 500 to 1750 μg, 500 to 2000 μg, 500 to 2250 μg, 500 to 2500 μg, 500 to 27501 μg, 500 to 3000 μg, 600 to 700 μg, 600 to 800 μg, 600 to 900 μg, 600 to 1000 μg, 600 to 1250 μg, 600 to 1500 μg, 600 to 1750 μg, 600 to 2000 μg, 600 to 2250 μg, 600 to 2500 μg, 600 to 2750 μg, 600 to 3000 μg, 700 to 800 μg, 700 to 900 μg, 700 to 1000 μg, 700 to 1250 μg, 700 to 1500 μg, 700 to 1750 μg, 700 to 2000 μg, 700 to 2250 μg, 700 to 2500 μg, 700 to 2750 μg, 700 to 3000 μg, 800 to 900 μg, 800 to 1000 μg, 800 to 1250 μg, 800 to 1500 μg, 800 to 17501 μg, 800 to 2000 μg, 800 to 2250 μg, 800 to 2500 μg, 800 to 2750 μg, 800 to 3000 μg, 900 to 1000 μg, 900 to 1250 μg, 900 to 1500 μg, 900 to 1750 μg, 900 to 2000 μg, 900 to 2250 μg, 900 to 2500 μg, 900 to 2750 μg, 900 to 3000 μg, 1000 to 1250 μg, 1000 to 1500 μg, 1000 to 1750 μg, 1000 to 2000 μg, 1000 to 2250 μg, 1000 to 2500 μg, 1000 to 2750 μg, 1000 to 3000 μg, 2 to 500 μg, 50 to 500 μg, 3 to 100 μg, 5 to 20 μg, 5 to 100 μg, 50 μg, 100 μg, 150 μg, 200 μg, 250 μg, 300 μg, 350 μg, 400 μg, 450 μg, 500 μg, 550 μg, 600 μg, 650 μg, 700 μg, 750 μg, 800 μg, 850 μg, 900 μg, 950 μg, 1000 μg, 1050 μg, 1100 μg, 1150 μg, 1200 μg, 1250 μg, 1300 μg, 1350 μg, 1400 μg, 1450 μg, 1500 μg, 1550 μg, 1600 μg, 1650 μg, 1700 μg, 1750 μg, 1800 μg, 1850 μg, 1900 μg, 1950 μg, 2000 μg, 2050 μg, 2100 μg, 2150 μg, 2200 μg, 2250 μg, 2300 μg, 2350 μg, 2400 μg, 2450 μg, 2500 μg, 2550 μg, 2600 μg, 2650 μg, 2700 μg, 2750 μg, 2800 μg, 2850 μg, 2900 μg, 2950 μg, 3000 μg, 3250 μg, 3500 μg, 3750 μg, 4000 μg, 4250 μg, 4500 μg, 4750 μg, 5000 μg of a peptide or agonist described herein and from 1 mg to 1000 mg (e.g. 1 mg, 5 mg, 10 mg, 15 mg, 20 mg, 25 mg, 30 mg, 35 mg, 40 mg, 45 mg, 50 mg, 75 mg, 100 mg, 150 mg, 200 mg, 250 mg, 300 mg, 350 mg, 400 mg, 450 mg, 500 mg, 550 mg, 600 mg, 650 mg, 700 mg, 750 mg, 800 mg, 850 mg, 900 mg, 950 mg, 1000 mg) of Dolasetron (Anzemet®).

[0487] A dosage unit (e.g. an oral dosage unit) can include, for example, from 1 to 30 g, to 40 μg, 1 to 50 μg, 1 to 100 μg, to 200 μg, 1 to 300 μg, 1 to 400 μg, 1 to 500 μg, 1 to 600 μg, 1 to 700 μg, 1 to 800 μg, 1 to 900 μg, 1 to 1000 μg, 10 to 30 μg, 10 to 40 μg, 10 to 50 μg, 10 to 100 μg, 10 to 200 μg, 10 to 300 μg, 10 to 400 μg, 10 to 500 μg, 10 to 600 μg, 10 to 700 μg, 10 to 800 μg, 10 to 900 μg, 10 to 1000 μg, 100 to 200 μg, 100 to 300 μg, 100 to 400 μg, 100 to 500 μg, 100 to 600 μg, 100 to 700 μg, 100 to 800 μg, 100 to 900 μg, 100 to 1000 μg, 100 to 1250 μg, 100 to 1500 μg, 100 to 1750 μg, 100 to 2000 μg, 100 to 2250 μg, 100 to 2500 μg, 100 to 2750 μg, 100 to 3000 μg, 200 to 300 μg, 200 to 400 μg, 200 to 500 μg, 200 to 600 μg, 200 to 700 μg, 200 to 800 μg, 200 to 900 μg, 200 to 1000 μg, 200 to 1250 μg, 200 to 1500 μg, 200 to 1750 μg, 200 to 2000 μg, 200 to 2250 μg, 200 to 2500 μg, 200 to 27501 μg, 200 to 3000 μg, 300 to 400 μg, 300 to 500 μg, 300 to 600 μg, 300 to 700 μg, 300 to 800 μg, 300 to 900 μg, 300 to 1000 μg, 300 to 1250 μg, 300 to 1500 μg, 300 to 1750 μg, 300 to 2000 μg, 300 to 2250 μg, 300 to 2500 μg, 300 to 2750 μg, 300 to 3000 μg, 400 to 500 μg, 400 to 600 μg, 400 to 700 μg, 400 to 800 μg, 400 to 900 μg, 400 to 1000 μg, 400 to 1250 μg, 400 to 1500 μg, 400 to 1750 μg, 400 to 2000 μg, 400 to 2250 μg, 400 to 2500 μg, 400 to 2750 μg, 400 to 3000 μg, 500 to 600 μg, 500 to 700 μg, 500 to 800 μg, 500 to 900 μg, 500 to 1000 μg, 500 to 1250 μg, 500 to 1500 μg, 500 to 1750 μg, 500 to 2000 μg, 500 to 2250 μg, 500 to 2500 μg, 500 to 2750 μg, 500 to 3000 μg, 600 to 700 μg, 600 to 800 μg, 600 to 900 μg, 600 to 1000 μg, 600 to 1250 μg, 600 to 1500 μg, 600 to 1750 μg, 600 to 2000 μg, 600 to 2250 μg, 600 to 2500 μg, 600 to 2750 μg, 600 to 3000 μg, 700 to 800 μg, 700 to 900 μg, 700 to 1000 μg, 700 to 1250 μg, 700 to 1500 μg, 700 to 1750 μg, 700 to 2000 μg, 700 to 2250 μg, 700 to 2500 μg, 700 to 2750 μg, 700 to 3000 μg, 800 to 900 μg, 800 to 1000 μg, 800 to 1250 μg, 800 to 1500 μg, 800 to 1750 μg, 800 to 2000 μg, 800 to 2250 μg, 800 to 2500 μg, 800 to 2750 μg, 800 to 3000 μg, 900 to 1000 μg, 900 to 1250 μg, 900 to 1500 μg, 900 to 1750 μg, 900 to 2000 μg, 900 to 2250 μg, 900 to 2500 μg, 900 to 2750 μg, 900 to 3000 μg, 1000 to 1250 μg, 1000 to 1500 μg, 1000 to 1750 μg, 1000 to 2000 μg, 1000 to 2250 μg, 1000 to 2500 μg, 1000 to 2750 μg, 1000 to 3000 μg, 2 to 500 μg, 50 to 500 μg, 3 to 10 μg, 5 to 20 μg, 5 to 100 μg, 50 μg, 100 μg, 150 μg, 200 μg, 250 μg, 300 μg, 350 μg, 400 μg, 450 μg, 500 μg, 550 μg, 600 μg, 650 μg, 700 μg, 750 μg, 800 μg, 850 μg, 900 μg, 950 μg, 1000 μg, 1050 μg, 1100 μg, 1150 μg, 1200 μg, 1250 μg, 1300 μg, 1350 μg, 1400 μg, 1450 μg, 1500 μg, 1550 μg, 1600 μg, 1650 μg, 1700 μg, 1750 μg, 1800 μg, 1850 μg, 1900 μg, 1950 μg, 2000 μg, 2050 μg, 2100 μg, 2150 μg, 2200 μg, 2250 μg, 2300 μg, 2350 μg, 2400 μg, 2450 μg, 2500 μg, 2550 μg, 2600 μg, 2650 μg, 2700 μg, 2750 μg, 2800 μg, 2850 μg, 2900 μg, 2950 μg, 3000 μg, 3250 μg, 3500 μg, 3750 μg, 4000 μg, 4250 μg, 4500 μg, 4750 μg, 5000 μg of a peptide or agonist described herein and from 1 mg to 180 mg (e.g. 1 mg, 2 mg, 3 mg, 4 mg, 5 mg, 6 mg, 7 mg, 8 mg, 9 mg, 10 mg, 20 mg, 30 mg, 40 mg, 50 mg, 60 mg, 70 mg, 80 mg, 90 mg, 100 mg, 110 mg, 120 mg, 130 mg, 140 mg, 150 mg, 160 mg, 170 mg, 180 mg) of Zelnorm® (tegaserod).

[0488] A dosage unit (e.g. an oral dosage unit) can include, for example, from 1 to 30 μg, to 40 μg, 1 to 50 μg, 1 to 100 μg, to 200 μg, 1 to 300 μg, 1 to 400 μg, 1 to 500 μg, 1 to 600 μg, 1 to 700 μg, 1 to 800 μg, 1 to 900 μg, 1 to 1000 μg, 10 to 30 μg, 10 to 40 μg, 10 to 50 μg, 10 to 100 μg, 10 to 200 μg, 10 to 300 μg, 10 to 400 μg, 10 to 500 μg, 10 to 600 μg, 10 to 700 μg, 10 to 800 μg, 10 to 900 μg, 10 to 1000 μg, 100 to 200 μg, 100 to 300 μg, 100 to 400 μg, 100 to 500 μg, 100 to 600 μg, 100 to 700 μg, 100 to 800 μg, 100 to 900 μg, 100 to 1000 μg, 100 to 1250 μg, 100 to 1500 μg, 100 to 1750 μg, 100 to 2000 μg, 100 to 2250 μg, 100 to 2500 μg, 100 to 2750 μg, 100 to 3000 μg, 200 to 300 μg, 200 to 400 μg, 200 to 500 μg, 200 to 600 μg, 200 to 700 μg, 200 to 800 μg, 200 to 900 μg, 200 to 1000 μg, 200 to 1250 μg, 200 to 1500 μg, 200 to 1750 μg, 200 to 2000 μg, 200 to 2250 μg, 200 to 2500 μg, 200 to 2750 μg, 200 to 3000 μg, 300 to 400 μg, 300 to 500 μg, 300 to 600 μg, 300 to 700 μg, 300 to 800 μg, 300 to 900 μg, 300 to 1000 μg, 300 to 1250 μg, 300 to 1500 μg, 300 to 1750 μg, 300 to 2000 μg, 300 to 2250 μg, 300 to 2500 μg, 300 to 2750 μg, 300 to 3000 μg, 400 to 500 μg, 400 to 600 μg, 400 to 700 μg, 400 to 800 μg, 400 to 900 μg, 400 to 1000 μg, 400 to 1250 μg, 400 to 1500 μg, 400 to 1750 μg, 400 to 2000 μg. 400 to 2250 μg, 400 to 2500 μg, 400 to 2750 μg, 400 to 3000 μg, 500 to 600 μg, 500 to 700 μg, 500 to 800 μg, 500 to 900 μg, 500 to 1000 μg, 500 to 1250 μg, 500 to 1500 μg, 500 to 1750 μg, 500 to 2000 μg, 500 to 2250 μg, 500 to 2500 μg, 500 to 2750 μg, 500 to 3000 μg, 600 to 700 μg, 600 to 800 μg, 600 to 900 μg, 600 to 1000 μg, 600 to 1250 μg, 600 to 1500 μg, 600 to 1750 μg, 600 to 2000 μg, 600 to 2250 μg, 600 to 2500 μg, 600 to 2750 μg, 600 to 3000 μg, 700 to 800 μg, 700 to 900 μg, 700 to 1000 μg, 700 to 1250 μg, 700 to 1500 μg, 700 to 1750 μg, 700 to 2000 μg, 700 to 2250 μg, 700 to 2500 μg, 700 to 2750 μg, 700 to 3000 μg, 800 to 900 μg, 800 to 1000 μg, 800 to 1250 μg, 800 to 1500 μg, 800 to 1750 μg, 800 to 2000 μg, 800 to 2250 μg, 800 to 2500 μg, 800 to 2750 μg, 800 to 3000 μg, 900 to 1000 μg, 900 to 1250 μg, 900 to 1500 μg, 900 to 1750 μg, 900 to 2000 μg, 900 to 2250 μg, 900 to 2500 μg, 900 to 2750 μg, 900 to 3000 μg, 1000 to 1250 μg, 1000 to 1500 μg, 1000 to 1750 μg, 1000 to 2000 μg, 1000 to 2250 μg, 1000 to 2500 μg, 1000 to 2750 μg, 1000 to 3000 μg, 2 to 500 μg, 50 to 500 μg, 3 to 10 μg, 5 to 20 μg, 5 to 100 μg, 50 μg, 100 μg, 150 μg, 200 μg, 250 μg, 300 μg, 350 μg, 400 μg, 450 μg, 500 μg, 550 μg, 600 μg, 650 μg, 700 μg, 750 μg, 800 μg, 850 μg, 900 μg, 950 μg, 1000 μg, 1050 μg, 1100 μg, 1150 μg, 1200 μg, 1250 μg, 1300 μg, 1350 μg, 1400 μg, 1450 μg, 1500 μg, 1550 μg, 1600 μg, 1650 μg, 1700 μg, 1750 μg, 1800 μg, 1850 μg, 1900 μg, 1950 μg, 2000 μg, 2050 μg, 2100 μg, 2150 μg, 2200 μg, 2250 μg, 2300 μg, 2350 μg, 2400 μg, 2450 μg, 2500 μg, 2550 μg, 2600 μg, 2650 μg, 2700 μg, 2750 μg, 2800 μg, 2850 μg, 2900 μg, 2950 μg, 3000 μg, 3250 μg, 3500 μg, 3750 μg, 4000 μg, 4250 μg, 4500 μg, 4750 μg, 5000 μg of a peptide or agonist described herein and from 1 μg to 500 μg (e.g. 1 μg, 5 μg, 10 μg, 50 μg, 75 μg, 100 μg, 125 μg, 150 μg, 175 μg, 200 μg, 225 μg, 250 μg, 275 μg, 300 μg, 325 μg, 350 μg, 375 μg, 400 μg, 425 μg, 450 μg, 475 μg, 500 μg) of Levsin® (hyoscyamine sulfate).

[0489] A dosage unit (e.g. an oral dosage unit) can include, for example, from 1 to 30 μg, to 40 μg, 1 to 50 μg, 1 to 100 μg, to 200 μg, 1 to 300 μg, 1 to 400 μg, 1 to 500 μg, 1 to 600 μg, 1 to 700 μg, 1 to 800 μg, 1 to 900 μg, 1 to 1000 μg, 10 to 30 μg, 10 to 40 μg, 10 to 50 μg, 10 to 100 μg, 10 to 200 μg, 10 to 300 μg, 10 to 400 μg, 10 to 500 μg, 10 to 600 μg, 10 to 700 μg, 10 to 800 μg, 10 to 900 μg, 10 to 1000 μg, 100 to 200 μg, 100 to 300 μg, 100 to 400 μg, 100 to 500 μg, 100 to 600 μg, 100 to 700 μg, 100 to 800 μg, 100 to 900 μg, 100 to 1000 μg, 100 to 1250 μg, 100 to 1500 μg, 100 to 1750 μg, 100 to 2000 μg, 100 to 2250 μg, 100 to 2500 μg, 100 to 2750 μg, 100 to 3000 μg, 200 to 300 μg, 200 to 400 μg, 200 to 500 μg, 200 to 600 μg, 200 to 700 μg, 200 to 800 μg, 200 to 900 μg, 200 to 1000 μg, 200 to 1250 μg, 200 to 1500 μg, 200 to 1750 μg, 200 to 2000 μg, 200 to 2250 μg, 200 to 2500 μg, 200 to 2750 μg, 200 to 3000 μg, 300 to 400 μg, 300 to 500 μg, 300 to 600 μg, 300 to 700 μg, 300 to 800 μg, 300 to 900 μg, 300 to 1000 μg, 300 to 1250 μg, 300 to 1500 μg, 300 to 1750 μg, 300 to 2000 μg, 300 to 2250 μg, 300 to 2500 μg, 300 to 2750 μg, 300 to 3000 μg, 400 to 500 μg, 400 to 600 μg, 400 to 700 μg, 400 to 800 μg, 400 to 900 μg, 400 to 1000 μg, 400 to 1250 μg, 400 to 1500 μg, 400 to 1750 μg, 400 to 2000 μg, 400 to 2250 μg, 400 to 2500 μg, 400 to 2750 μg, 400 to 3000 μg, 500 to 600 μg, 500 to 700 μg, 500 to 800 μg, 500 to 900 μg, 500 to 1000 μg, 500 to 1250 μg, 500 to 1500 μg, 500 to 1750 μg, 500 to 2000 μg, 500 to 2250 μg, 500 to 2500 μg, 500 to 2750 μg, 500 to 3000 μg, 600 to 700 μg, 600 to 800 μg, 600 to 900 μg, 600 to 1000 μg, 600 to 1250 μg, 600 to 1500 μg, 600 to 1750 μg, 600 to 2000 μg, 600 to 2250 μg, 600 to 2500 μg, 600 to 2750 μg, 600 to 3000 μg, 700 to 800 μg, 700 to 900 μg, 700 to 1000 μg, 700 to 1250 μg, 700 to 1500 μg, 700 to 1750 μg, 700 to 2000 μg, 700 to 2250 μg, 700 to 2500 μg, 700 to 2750 μg, 700 to 3000 μg, 800 to 900 μg, 800 to 1000 μg, 800 to 1250 μg, 800 to 1500 μg, 800 to 1750 μg, 800 to 2000 μg, 800 to 2250 μg, 800 to 2500 μg, 800 to 2750 μg, 800 to 3000 μg, 900 to 1000 μg, 900 to 1250 μg, 900 to 1500 μg, 900 to 1750 μg, 900 to 2000 μg, 900 to 2250 μg, 900 to 2500 μg, 900 to 2750 μg, 900 to 3000 μg, 1000 to 1250 μg, 1000 to 1500 μg, 1000 to 1750 μg, 1000 to 2000 μg, 1000 to 2250 μg, 1000 to 2500 μg, 1000 to 2750 μg, 1000 to 3000 μg, 2 to 500 μg, 50 to 500 μg, 3 to 10 μg, 5 to 20 μg, 5 to 100 μg, 50 μg, 100 μg, 150 μg, 200 μg, 250 μg, 300 μg, 350 μg, 400 μg, 450 μg, 500 μg, 550 μg, 600 μg, 650 μg, 700 μg, 750 μg, 800 μg, 850 μg, 900 μg, 950 μg, 1000 μg, 1050 μg, 1100 μg, 1150 μg, 1200 μg, 1250 μg, 1300 μg, 1350 μg, 1400 μg, 1450 μg, 1500 μg, 1550 μg, 1600 μg, 1650 μg, 1700 μg, 1750 μg, 1800 μg, 1850 μg, 1900 μg, 1950 μg, 2000 μg, 2050 μg, 2100 μg, 2150 μg, 2200 μg, 2250 μg, 2300 μg, 2350 μg, 2400 μg, 2450 μg, 2500 μg, 2550 μg, 2600 μg, 2650 μg, 2700 μg, 2750 μg, 2800 μg, 2850 μg, 2900 μg, 2950 μg, 3000 μg, 3250 μg, 3500 μg, 3750 μg, 4000 μg, 4250 μg, 4500 μg, 4750 μg, 5000 μg of a peptide or agonist described herein and from 50 mg to 500 mg (e.g. 50 mg, 60 mg, 70 mg, 80 mg, 90 mg, 100 mg, 125 mg, 150 mg, 175 mg, 200 mg, 225 mg, 250 mg, 275 mg, 300 mg, 325 mg, 350 mg, 375 mg, 400 mg, 425 mg, 450 mg, 500 mg) of Dicetel® (pinaverium bromide).

[0490] A dosage unit (e.g. an oral dosage unit) can include, for example, from 1 to 30 μg, to 40 μg, 1 to 50 μg, 1 to 100 μg, to 200 μg, 1 to 300 μg, 1 to 400 μg, 1 to 500 μg, 1 to 600 μg, 1 to 700 μg, 1 to 800 μg, 1 to 900 μg, 1 to 1000 μg, 10 to 30 μg, 10 to 40 μg, 10 to 50 μg, 10 to 100 μg, 10 to 200 μg, 10 to 300 μg, 10 to 400 μg, 10 to 500 μg, 10 to 600 μg, 10 to 700 μg, 10 to 800 μg, 10 to 900 μg, 10 to 1000 μg, 100 to 200 μg, 100 to 300 μg, 100 to 400 μg, 100 to 500 μg, 100 to 600 μg, 100 to 700 μg, 100 to 800 μg, 100 to 900 μg, 100 to 1000 μg, 100 to 1250 μg, 100 to 1500 μg, 100 to 1750 μg, 100 to 2000 μg, 100 to 2250 μg, 100 to 2500 μg, 100 to 2750 μg, 100 to 3000 μg, 200 to 300 μg, 200 to 400 μg, 200 to 500 μg, 200 to 600 μg, 200 to 700 μg, 200 to 800 μg, 200 to 900 μg, 200 to 1000 μg, 200 to 1250 μg, 200 to 1500 μg, 200 to 1750 μg, 200 to 2000 μg, 200 to 2250 μg, 200 to 2500 μg, 200 to 27501 μg, 200 to 3000 μg, 300 to 400 μg, 300 to 500 μg, 300 to 600 μg, 300 to 700 μg, 300 to 800 μg, 300 to 900 μg, 300 to 1000 μg, 300 to 1250 μg, 300 to 1500 μg, 300 to 1750 μg, 300 to 2000 μg, 300 to 2250 μg, 300 to 2500 μg, 300 to 2750 μg, 300 to 3000 μg, 400 to 500 μg, 400 to 600 μg, 400 to 700 μg, 400 to 800 μg, 400 to 900 μg, 400 to 1000 μg, 400 to 1250 μg, 400 to 1500 μg, 400 to 1750 μg, 400 to 2000 μg, 400 to 2250 μg, 400 to 2500 μg, 400 to 2750 μg, 400 to 3000 μg, 500 to 600 μg, 500 to 700 μg, 500 to 800 μg, 500 to 900 μg, 500 to 1000 μg, 500 to 1250 μg, 500 to 1500 μg, 500 to 1750 μg, 500 to 2000 μg, 500 to 2250 μg, 500 to 2500 μg, 500 to 2750 μg, 500 to 3000 μg, 600 to 700 μg, 600 to 800 μg, 600 to 900 μg, 600 to 1000 μg, 600 to 1250 μg, 600 to 1500 μg, 600 to 1750 μg, 600 to 2000 μg, 600 to 2250 μg, 600 to 2500 μg, 600 to 2750 μg, 600 to 3000 μg, 700 to 800 μg, 700 to 900 μg, 700 to 1000 μg, 700 to 1250 μg, 700 to 1500 μg, 700 to 1750 μg, 700 to 2000 μg, 700 to 2250 μg, 700 to 2500 μg, 700 to 2750 μg, 700 to 3000 μg, 800 to 900 μg, 800 to 1000 μg, 800 to 1250 μg, 800 to 1500 μg, 800 to 1750 μg, 800 to 2000 μg, 800 to 2250 μg, 800 to 2500 μg, 800 to 2750 μg, 800 to 3000 μg, 900 to 1000 μg, 900 to 1250 μg, 900 to 1500 μg, 900 to 1750 μg, 900 to 2000 μg, 900 to 2250 μg, 900 to 2500 μg, 900 to 2750 μg, 900 to 3000 μg, 1000 to 1250 μg, 1000 to 1500 μg, 1000 to 1750 μg, 1000 to 2000 μg, 1000 to 2250 μg, 1000 to 2500 μg, 1000 to 2750 μg, 1000 to 3000 μg, 2 to 500 μg, 50 to 500 μg, 3 to 10 μg, 5 to 20 μg, 5 to 100 μg, 50 μg, 100 μg, 150 μg, 200 μg, 250 μg, 300 μg, 350 μg, 400 μg, 450 μg, 500 μg, 550 μg, 600 μg, 650 μg, 700 μg, 750 μg, 800 μg, 850 μg, 900 μg, 950 μg, 1000 μg, 1050 μg, 1100 μg, 1150 μg, 1200 μg, 1250 μg, 1300 μg, 1350 μg, 1400 μg, 1450 μg, 1500 μg, 1550 μg, 1600 μg, 1650 μg, 1700 μg, 1750 μg, 1800 μg, 1850 μg, 1900 μg, 1950 μg, 2000 μg, 2050 μg, 2100 μg, 2150 μg, 2200 μg, 2250 μg, 2300 μg, 2350 μg, 2400 μg, 2450 μg, 2500 μg, 2550 μg, 2600 μg, 2650 μg, 2700 μg, 2750 μg, 2800 μg, 2850 μg, 2900 μg, 2950 μg, 3000 μg, 3250 μg, 3500 μg, 3750 μg, 4000 μg, 4250 μg, 4500 μg, 4750 μg, 5000 μg of a peptide or agonist described herein and from 50 mg to 500 mg (e.g. 50 mg, 75 mg, 100 mg, 125 mg, 135 mg, 150 mg, 175 mg, 200 mg, 225 mg, 250 mg, 275 mg, 300 mg, 325 mg, 350 mg, 375 mg, 400 mg, 425 mg, 450 mg, 475 mg, 500 mg) of mebeverine (DUSPATAL®, DUSPATALIN®, COLOFAC MR®, COLOTAL®).

[0491] A dosage unit (e.g. an oral dosage unit) can include, for example, from 1 to 30 μg, 1 to 40 μg, 1 to 50 μg, 1 to 100 μg, 1 to 200 μg, 1 to 300 μg, 1 to 400 μg, 1 to 500 μg, 1 to 600 μg, 1 to 700 μg, 1 to 800 μg, 1 to 900 μg, 1 to 1000 μg, 10 to 30 μg, 10 to 40 μg, 10 to 50 μg, 10 to 100 μg, 10 to 200 μg, 10 to 300 μg, 10 to 400 μg, 10 to 500 μg, 10 to 600 μg, 10 to 700 μg, 10 to 800 μg, 10 to 900 μg, 10 to 1000 μg, 100 to 200 μg, 100 to 300 μg, 100 to 400 μg, 100 to 500 μg, 100 to 600 μg, 100 to 700 μg, 100 to 800 μg, 100 to 900 μg, 100 to 1000 μg, 100 to 1250 μg, 100 to 1500 μg, 100 to 1750 μg, 100 to 2000 μg, 100 to 2250 μg, 100 to 2500 μg, 100 to 2750 μg, 100 to 3000 μg, 200 to 300 μg, 200 to 400 μg, 200 to 500 μg, 200 to 600 μg, 200 to 700 μg, 200 to 800 μg, 200 to 900 μg, 200 to 1000 μg, 200 to 1250 μg, 200 to 1500 μg, 200 to 1750 μg, 200 to 2000 μg, 200 to 2250 μg, 200 to 2500 μg, 200 to 2750 μg, 200 to 3000 μg, 300 to 400 μg, 300 to 500 μg, 300 to 600 μg, 300 to 700 μg, 300 to 800 μg, 300 to 900 μg, 300 to 1000 μg, 300 to 1250 μg, 300 to 1500 μg, 300 to 1750 μg, 300 to 2000 μg, 300 to 2250 μg, 300 to 2500 μg, 300 to 2750 μg, 300 to 3000 μg, 400 to 500 μg, 400 to 600 μg, 400 to 700 μg, 400 to 800 μg, 400 to 900 μg, 400 to 1000 μg, 400 to 1250 μg, 400 to 1500 μg, 400 to 1750 μg, 400 to 2000 μg, 400 to 2250 μg, 400 to 2500 μg, 400 to 2750 μg, 400 to 3000 μg, 500 to 600 μg, 500 to 700 μg, 500 to 800 μg, 500 to 900 μg, 500 to 1000 μg, 500 to 1250 μg, 500 to 1500 μg, 500 to 1750 μg, 500 to 2000 μg, 500 to 2250 μg, 500 to 2500 μg, 500 to 2750 μg, 500 to 3000 μg, 600 to 700 μg, 600 to 800 μg, 600 to 900 μg, 600 to 1000 μg, 600 to 1250 μg, 600 to 1500 μg, 600 to 1750 μg, 600 to 2000 μg, 600 to 2250 μg, 600 to 2500 μg, 600 to 2750 μg, 600 to 3000 μg, 700 to 800 μg, 700 to 900 μg, 700 to 1000 μg, 700 to 1250 μg, 700 to 1500 μg, 700 to 1750 μg, 700 to 2000 μg, 700 to 2250 μg, 700 to 2500 μg, 700 to 2750 μg, 700 to 3000 μg, 800 to 900 μg, 800 to 1000 μg, 800 to 1250 μg, 800 to 1500 μg, 800 to 1750 μg, 800 to 2000 μg, 800 to 2250 μg, 800 to 2500 μg, 800 to 2750 μg, 800 to 3000 μg, 900 to 1000 μg, 900 to 1250 μg, 900 to 1500 μg, 900 to 1750 μg, 900 to 2000 μg, 900 to 2250 μg, 900 to 2500 μg, 900 to 2750 μg, 900 to 3000 μg, 1000 to 1250 μg, 1000 to 1500 μg, 1000 to 1750 μg, 1000 to 2000 μg, 1000 to 2250 μg, 1000 to 2500 μg, 1000 to 2750 μg, 1000 to 3000 μg, 2 to 500 μg, 50 to 500 μg, 3 to 10 μg, 5 to 20 μg, 5 to 100 μg, 50 μg, 100 μg, 150 μg, 200 μg, 250 μg, 300 μg, 350 μg, 400 μg, 450 μg, 500 μg, 550 μg, 600 μg, 650 μg, 700 μg, 750 μg, 800 μg, 850 μg, 900 μg, 950 μg, 1000 μg, 1050 μg, 1100 μg, 1150 μg, 1200 μg, 1250 μg, 1300 μg, 1350 μg, 1400 μg, 1450 μg, 1500 μg, 1550 μg, 1600 μg, 1650 μg, 1700 μg, 1750 μg, 1800 μg, 1850 μg, 1900 μg, 1950 μg, 2000 μg, 2050 μg, 2100 μg, 2150 μg, 2200 μg, 2250 μg, 2300 μg, 2350 μg, 2400 μg, 2450 μg, 2500 μg, 2550 μg, 2600 μg, 2650 μg, 2700 μg, 2750 μg, 2800 μg, 2850 μg, 2900 μg, 2950 μg, 3000 μg, 3250 μg, 3500 μg, 3750 μg, 4000 μg, 4250 μg, 4500 μg, 4750 μg, 5000 μg of a peptide or agonist described herein and from 1 mg to 120 mg (e.g. 1 mg, 2.5 mg, 5 mg, 7.5 mg, 10 mg, 12.5 mg, 15 mg, 20 mg, 25 mg, 30 mg, 40 mg, 50 mg, 60 mg, 70 mg, 80 mg, 90 mg, 100 mg, 110 mg, 120 mg) of Propanthiline bromide (Pro-Banthine®).

[0492] A dosage unit (e.g. an oral dosage unit) can include, for example, from 1 to 30 μg, to 40 μg, 1 to 50 μg, 1 to 100 μg, to 200 μg, 1 to 300 μg, 1 to 400 μg, 1 to 500 μg, 1 to 600 μg, 1 to 700 μg, 1 to 800 μg, 1 to 900 μg, 1 to 1000 μg, 10 to 30 μg, 10 to 40 μg, 10 to 50 μg, 10 to 100 μg, 10 to 200 μg, 10 to 300 μg, 10 to 400 μg, 10 to 500 μg, 10 to 600 μg, 10 to 700 μg, 10 to 800 μg, 10 to 900 μg, 10 to 1000 μg, 100 to 200 μg, 100 to 300 μg, 100 to 400 μg, 100 to 500 μg, 100 to 600 μg, 100 to 700 μg, 100 to 800 μg, 100 to 900 μg, 100 to 1000 μg, 100 to 1250 μg, 100 to 1500 μg, 100 to 1750 μg, 100 to 2000 μg, 100 to 2250 μg, 100 to 2500 μg, 100 to 2750 μg, 100 to 3000 μg, 200 to 300 μg, 200 to 400 μg, 200 to 500 μg, 200 to 600 μg, 200 to 700 μg, 200 to 800 μg, 200 to 900 μg, 200 to 1000 μg, 200 to 1250 μg, 200 to 1500 μg, 200 to 1750 μg, 200 to 2000 μg, 200 to 2250 μg, 200 to 2500 μg, 200 to 27501 μg, 200 to 3000 μg, 300 to 400 μg, 300 to 500 μg, 300 to 600 μg, 300 to 700 μg, 300 to 800 μg, 300 to 900 μg, 300 to 1000 μg, 300 to 1250 μg, 300 to 1500 μg, 300 to 1750 μg, 300 to 2000 μg, 300 to 2250 μg, 300 to 2500 μg, 300 to 2750 μg, 300 to 3000 μg, 400 to 500 μg, 400 to 600 μg, 400 to 700 μg, 400 to 800 μg, 400 to 900 μg, 400 to 1000 μg, 400 to 1250 μg, 400 to 1500 μg, 400 to 1750 μg, 400 to 2000 μg, 400 to 2250 μg, 400 to 2500 μg, 400 to 2750 μg, 400 to 3000 μg, 500 to 600 μg, 500 to 700 μg, 500 to 800 μg, 500 to 900 μg, 500 to 1000 μg, 500 to 1250 μg, 500 to 1500 μg, 500 to 1750 μg, 500 to 2000 μg, 500 to 2250 μg, 500 to 2500 μg, 500 to 2750 μg, 500 to 3000 μg, 600 to 700 μg, 600 to 800 μg, 600 to 900 μg, 600 to 1000 μg, 600 to 1250 μg, 600 to 1500 μg, 600 to 1750 μg, 600 to 2000 μg, 600 to 2250 μg, 600 to 2500 μg, 600 to 2750 μg, 600 to 3000 μg, 700 to 800 μg, 700 to 900 μg, 700 to 1000 μg, 700 to 1250 μg, 700 to 1500 μg, 700 to 1750 μg, 700 to 2000 μg, 700 to 2250 μg, 700 to 2500 μg, 700 to 2750 μg, 700 to 3000 μg, 800 to 900 μg, 800 to 1000 μg, 800 to 1250 μg, 800 to 1500 μg, 800 to 1750 μg, 800 to 2000 μg, 800 to 2250 μg, 800 to 2500 μg, 800 to 2750 μg, 800 to 3000 μg, 900 to 1000 μg, 900 to 1250 μg, 900 to 1500 μg, 900 to 1750 μg, 900 to 2000 μg, 900 to 2250 μg, 900 to 2500 μg, 900 to 2750 μg, 900 to 3000 μg, 1000 to 1250 μg, 1000 to 1500 μg, 1000 to 1750 μg, 1000 to 2000 μg, 1000 to 2250 μg, 1000 to 2500 μg, 1000 to 2750 μg, 1000 to 3000 μg, 2 to 500 μg, 50 to 500 μg, 3 to 10 μg, 5 to 20 μg, 5 to 100 μg, 50 μg, 100 μg, 150 μg, 200 μg, 250 μg, 300 μg, 350 μg, 400 μg, 450 μg, 500 μg, 550 μg, 600 μg, 650 μg, 700 μg, 750 μg, 800 μg, 850 μg, 900 μg, 950 μg, 1000 μg, 1050 μg, 1100 μg, 1150 μg, 1200 μg, 1250 μg, 1300 μg, 1350 μg, 1400 μg, 1450 μg, 1500 μg, 1550 μg, 1600 μg, 1650 μg, 1700 μg, 1750 μg, 1800 μg, 1850 μg, 1900 μg, 1950 μg, 2000 μg, 2050 μg, 2100 μg, 2150 μg, 2200 μg, 2250 μg, 2300 μg, 2350 μg, 2400 μg, 2450 μg, 2500 μg, 2550 μg, 2600 μg, 2650 μg, 2700 μg, 2750 μg, 2800 μg, 2850 μg, 2900 μg, 2950 μg, 3000 μg, 3250 μg, 3500 μg, 3750 μg, 4000 μg, 4250 μg, 4500 μg, 4750 μg, 5000 μg of a peptide or agonist described herein and from 100 μg to 5000 μg (e.g. 100 μg, 200 μg, 300 μg, 400 μg, 500 μg, 600 μg, 700 μg, 800 μg, 900 μg, 1000 μg, 1250 μg, 1500 μg, 1750 μg, 2000 μg, 2250 μg, 2500 μg, 2750 μg, 3000 μg, 3500 μg, 4000 μg, 4500 μg, 5000 μg) of Granisetron (Kytril®).

[0493] A dosage unit (e.g. an oral dosage unit) can include, for example, from 1 to 30 μg, to 40 μg, 1 to 50 μg, 1 to 100 μg, to 200 μg, 1 to 300 μg, 1 to 400 μg, 1 to 500 μg, 1 to 600 μg, 1 to 700 μg, 1 to 800 μg, 1 to 900 μg, 1 to 1000 μg, 10 to 30 μg, 10 to 40 μg, 10 to 50 μg, 10 to 100 μg, 10 to 200 μg, 10 to 300 μg, 10 to 400 μg, 10 to 500 μg, 10 to 600 μg, 10 to 700 μg, 10 to 800 μg, 10 to 900 μg, 10 to 1000 μg, 100 to 200 μg, 100 to 300 μg, 100 to 400 μg, 100 to 500 μg, 100 to 600 μg, 100 to 700 μg, 100 to 800 μg, 100 to 900 μg, 100 to 1000 μg, 100 to 1250 μg, 100 to 1500 μg, 100 to 1750 μg, 100 to 2000 μg, 100 to 2250 μg, 100 to 2500 μg, 100 to 2750 μg, 100 to 3000 μg, 200 to 300 μg, 200 to 400 μg, 200 to 500 μg, 200 to 600 μg, 200 to 700 μg, 200 to 800 μg, 200 to 900 μg, 200 to 1000 μg, 200 to 1250 μg, 200 to 1500 μg, 200 to 1750 μg, 200 to 2000 μg, 200 to 2250 μg, 200 to 2500 μg, 200 to 2750 μg, 200 to 3000 μg, 300 to 400 μg, 300 to 500 μg, 300 to 600 μg, 300 to 700 μg, 300 to 800 μg, 300 to 900 μg, 300 to 1000 μg, 300 to 1250 μg, 300 to 1500 μg, 300 to 1750 μg, 300 to 2000 μg, 300 to 2250 μg, 300 to 2500 μg, 300 to 2750 μg, 300 to 3000 μg, 400 to 500 μg, 400 to 600 μg, 400 to 700 μg, 400 to 800 μg, 400 to 900 μg, 400 to 1000 μg, 400 to 1250 μg, 400 to 1500 μg, 400 to 1750 μg, 400 to 2000 μg, 400 to 2250 μg, 400 to 2500 μg, 400 to 2750 μg, 400 to 3000 μg, 500 to 600 μg, 500 to 700 μg, 500 to 800 μg, 500 to 900 μg, 500 to 1000 μg, 500 to 1250 μg, 500 to 1500 μg, 500 to 1750 μg, 500 to 2000 μg, 500 to 2250 μg, 500 to 2500 μg, 500 to 2750 μg, 500 to 3000 μg, 600 to 700 μg, 600 to 800 μg, 600 to 900 μg, 600 to 1000 μg, 600 to 1250 μg, 600 to 1500 μg, 600 to 1750 μg, 600 to 2000 μg, 600 to 2250 μg, 600 to 2500 μg, 600 to 2750 μg, 600 to 3000 μg, 700 to 800 μg, 700 to 900 μg, 700 to 1000 μg, 700 to 1250 μg, 700 to 1500 μg, 700 to 1750 μg, 700 to 2000 μg, 700 to 2250 μg, 700 to 2500 μg, 700 to 2750 μg, 700 to 3000 μg, 800 to 900 μg, 800 to 1000 μg, 800 to 1250 μg, 800 to 1500 μg, 800 to 1750 μg, 800 to 2000 μg, 800 to 2250 μg, 800 to 2500 μg, 800 to 2750 μg, 800 to 3000 μg, 900 to 1000 μg, 900 to 1250 μg, 900 to 1500 μg, 900 to 1750 μg, 900 to 2000 μg, 900 to 2250 μg, 900 to 2500 μg, 900 to 2750 μg, 900 to 3000 μg, 1000 to 1250 μg, 1000 to 1500 μg, 1000 to 1750 μg, 1000 to 2000 μg, 1000 to 2250 μg, 1000 to 2500 μg, 1000 to 2750 μg, 1000 to 3000 μg, 2 to 500 μg, 50 to 500 μg, 3 to 10 μg, 5 to 20 μg, 5 to 100 μg, 50 μg, 100 μg, 150 μg, 200 μg, 250 μg, 300 μg, 350 μg, 400 μg, 450 μg, 500 μg, 550 μg, 600 μg, 650 μg, 700 μg, 750 μg, 800 μg, 850 μg, 900 μg, 950 μg, 1000 μg, 1050 μg, 1100 μg, 1150 μg, 1200 μg, 1250 μg, 1300 μg, 1350 μg, 1400 μg, 1450 μg, 1500 μg, 1550 μg, 1600 μg, 1650 μg, 1700 μg, 1750 μg, 1800 μg, 1850 μg, 1900 μg, 1950 μg, 2000 μg, 2050 μg, 2100 μg, 2150 μg, 2200 μg, 2250 μg, 2300 μg, 2350 μg, 2400 μg, 2450 μg, 2500 μg, 2550 μg, 2600 μg, 2650 μg, 2700 μg, 2750 μg, 2800 μg, 2850 μg, 2900 μg, 2950 μg, 3000 μg, 3250 μg, 3500 μg, 3750 μg, 4000 μg, 4250 μg, 4500 μg, 4750 μg, 5000 μg of a peptide or agonist described herein and from 50 μg to 3000 μg (e.g. 50 μg, 100 μg, 200 μg, 300 μg, 400 μg, 500 μg, 600 μg, 700 μg, 800 μg, 900 μg, 1000 μg, 1250 μg, 1500 μg, 1750 μg, 2000 μg, 2250 μg, 2500 μg, 2750 μg, 3000 μg) of Lotronex® (alosetron hydrochloride).

[0494] A dosage unit (e.g. an oral dosage unit) can include, for example, from 1 to 30 μg, to 40 μg, 1 to 50 μg, 1 to 100 μg, to 200 μg, 1 to 300 μg, 1 to 400 μg, 1 to 500 μg, 1 to 600 μg, 1 to 700 μg, 1 to 800 μg, 1 to 900 μg, 1 to 1000 μg, 10 to 30 μg, 10 to 40 μg, 10 to 50 μg, 10 to 100 μg, 10 to 200 μg, 10 to 300 μg, 10 to 400 μg, 10 to 500 μg, 10 to 600 μg, 10 to 700 μg, 10 to 800 μg, 10 to 900 μg, 10 to 1000 μg, 100 to 200 μg, 100 to 300 μg, 100 to 400 μg, 100 to 500 μg, 100 to 600 μg, 100 to 700 μg, 100 to 800 μg, 100 to 900 μg, 100 to 1000 μg, 100 to 1250 μg, 100 to 1500 μg, 100 to 1750 μg, 100 to 2000 μg, 100 to 2250 μg, 100 to 2500 μg, 100 to 2750 μg, 100 to 3000 μg, 200 to 300 μg, 200 to 400 μg, 200 to 500 μg, 200 to 600 μg, 200 to 700 μg, 200 to 800 μg, 200 to 900 μg, 200 to 1000 μg, 200 to 1250 μg, 200 to 1500 μg, 200 to 1750 μg, 200 to 2000 μg, 200 to 2250 μg, 200 to 2500 μg, 200 to 2750 μg, 200 to 3000 μg, 300 to 400 μg, 300 to 500 μg, 300 to 600 μg, 300 to 700 μg, 300 to 800 μg, 300 to 900 μg, 300 to 1000 μg, 300 to 1250 μg, 300 to 1500 μg, 300 to 1750 μg, 300 to 2000 μg, 300 to 2250 μg, 300 to 2500 μg, 300 to 2750 μg, 300 to 3000 μg, 400 to 500 μg, 400 to 600 μg, 400 to 700 μg, 400 to 800 μg, 400 to 900 μg, 400 to 1000 μg, 400 to 1250 μg, 400 to 1500 μg, 400 to 1750 μg, 400 to 2000 μg, 400 to 2250 μg, 400 to 2500 μg, 400 to 2750 μg, 400 to 3000 μg, 500 to 600 μg, 500 to 700 μg, 500 to 800 μg, 500 to 900 μg, 500 to 1000 μg, 500 to 1250 μg, 500 to 1500 μg, 500 to 1750 μg, 500 to 2000 μg, 500 to 2250 μg, 500 to 2500 μg, 500 to 2750 μg, 500 to 3000 μg, 600 to 700 μg, 600 to 800 μg, 600 to 900 μg, 600 to 1000 μg, 600 to 1250 μg, 600 to 1500 μg, 600 to 1750 μg, 600 to 2000 μg, 600 to 2250 μg, 600 to 2500 μg, 600 to 2750 μg, 600 to 3000 μg, 700 to 800 μg, 700 to 900 μg, 700 to 1000 μg, 700 to 1250 μg, 700 to 1500 μg, 700 to 1750 μg, 700 to 2000 μg, 700 to 2250 μg, 700 to 2500 μg, 700 to 2750 μg, 700 to 3000 μg, 800 to 900 μg, 800 to 1000 μg, 800 to 1250 μg, 800 to 1500 μg, 800 to 1750 μg, 800 to 2000 μg, 800 to 2250 μg, 800 to 2500 μg, 800 to 2750 μg, 800 to 3000 μg, 900 to 1000 μg, 900 to 1250 μg, 900 to 1500 μg, 900 to 1750 μg, 900 to 2000 μg, 900 to 2250 μg, 900 to 2500 μg, 900 to 2750 μg, 900 to 3000 μg, 1000 to 1250 μg, 1000 to 1500 μg, 1000 to 1750 μg, 1000 to 2000 μg, 1000 to 2250 μg, 1000 to 2500 μg, 1000 to 2750 μg, 1000 to 3000 μg, 2 to 500 μg, 50 to 500 μg, 3 to 100 μg, 5 to 20 μg, 5 to 100 μg, 50 μg, 100 μg, 150 μg, 200 μg, 250 μg, 300 μg, 350 μg, 400 μg, 450 μg, 500 μg, 550 μg, 600 μg, 650 μg, 700 μg, 750 μg, 800 μg, 850 μg, 900 μg, 950 μg, 1000 μg, 1050 μg, 1100 μg, 1150 μg, 1200 μg, 1250 μg, 1300 μg, 1350 μg, 1400 μg, 1450 μg, 1500 μg, 1550 μg, 1600 μg, 1650 μg, 1700 μg, 1750 μg, 1800 μg, 1850 μg, 1900 μg, 1950 μg, 2000 μg, 2050 μg, 2100 μg, 2150 μg, 2200 μg, 2250 μg, 2300 μg, 2350 μg, 2400 μg, 2450 μg, 2500 μg, 2550 μg, 2600 μg, 2650 μg, 2700 μg, 2750 μg, 2800 μg, 2850 μg, 2900 μg, 2950 μg, 3000 μg, 3250 μg, 3500 μg, 3750 μg, 4000 μg, 4250 μg, 4500 μg, 4750 μg, 5000 μg of a peptide or agonist described herein and from 10 mg to 600 mg (e.g. 10 mg, 20 mg, 30 mg, 40 mg, 50 mg, 60 mg, 70 mg, 80 mg, 90 mg, 100 mg, 125 mg, 150 mg, 175 mg, 200 mg, 250 mg, 300 mg, 350 mg, 400 mg, 450 mg, 500 mg, 550 mg, 600 mg) of Xifaxan® (rifaximin).

[0495] A dosage unit (e.g. an oral dosage unit) can include, for example, from 1 to 30 g, to 40 μg, 1 to 50 μg, 1 to 100 μg, to 200 μg, 1 to 300 μg, 1 to 400 μg, 1 to 500 μg, 1 to 600 μg, 1 to 700 μg, 1 to 800 μg, 1 to 900 μg, 1 to 1000 μg, 10 to 30 μg, 10 to 40 μg, 10 to 50 μg, 10 to 100 μg, 10 to 200 μg, 10 to 300 μg, 10 to 400 μg, 10 to 500 μg, 10 to 600 μg, 10 to 700 μg, 10 to 800 μg, 10 to 900 μg, 10 to 1000 μg, 100 to 200 μg, 100 to 300 μg, 100 to 400 μg, 100 to 500 μg, 100 to 600 μg, 100 to 700 μg, 100 to 800 μg, 100 to 900 μg, 100 to 1000 μg, 100 to 1250 μg, 100 to 1500 μg, 100 to 1750 μg, 100 to 2000 μg, 100 to 2250 μg, 100 to 2500 μg, 100 to 2750 μg, 100 to 3000 μg, 200 to 300 μg, 200 to 400 μg, 200 to 500 μg, 200 to 600 μg, 200 to 700 μg, 200 to 800 μg, 200 to 900 μg, 200 to 1000 μg, 200 to 1250 μg, 200 to 1500 μg, 200 to 1750 μg, 200 to 2000 μg, 200 to 2250 μg, 200 to 2500 μg, 200 to 27501 μg, 200 to 3000 μg, 300 to 400 μg, 300 to 500 μg, 300 to 600 μg, 300 to 700 μg, 300 to 800 μg, 300 to 900 μg, 300 to 1000 μg, 300 to 1250 μg, 300 to 1500 μg, 300 to 1750 μg, 300 to 2000 μg, 300 to 22501 μg, 300 to 2500 μg, 300 to 2750 μg, 300 to 3000 μg, 400 to 500 μg, 400 to 600 μg, 400 to 700 μg, 400 to 800 μg, 400 to 900 μg, 400 to 1000 μg, 400 to 1250 μg, 400 to 1500 μg, 400 to 1750 μg, 400 to 2000 μg, 400 to 2250 μg, 400 to 2500 μg, 400 to 27501 μg, 400 to 3000 μg, 500 to 600 μg, 500 to 700 μg, 500 to 800 μg, 500 to 900 μg, 500 to 1000 μg, 500 to 1250 μg, 500 to 1500 μg, 500 to 1750 μg, 500 to 2000 μg, 500 to 2250 μg, 500 to 2500 μg, 500 to 27501 μg, 500 to 3000 μg, 600 to 700 μg, 600 to 800 μg, 600 to 900 μg, 600 to 1000 μg, 600 to 1250 μg, 600 to 1500 μg, 600 to 1750 μg, 600 to 2000 μg, 600 to 2250 μg, 600 to 2500 μg, 600 to 2750 μg, 600 to 3000 μg, 700 to 800 μg, 700 to 900 μg, 700 to 1000 μg, 700 to 1250 μg, 700 to 1500 μg, 700 to 1750 μg, 700 to 2000 μg, 700 to 2250 μg, 700 to 2500 μg, 700 to 2750 μg, 700 to 3000 μg, 800 to 900 μg, 800 to 1000 μg, 800 to 1250 μg, 800 to 1500 μg, 800 to 17501 μg, 800 to 2000 μg, 800 to 2250 μg, 800 to 2500 μg, 800 to 2750 μg, 800 to 3000 μg, 900 to 1000 μg, 900 to 1250 μg, 900 to 1500 μg, 900 to 1750 μg, 900 to 2000 μg, 900 to 2250 μg, 900 to 2500 μg, 900 to 2750 μg, 900 to 3000 μg, 1000 to 1250 μg, 1000 to 1500 μg, 1000 to 1750 μg, 1000 to 2000 μg, 1000 to 2250 μg, 1000 to 2500 μg, 1000 to 2750 μg, 1000 to 3000 μg, 2 to 500 μg, 50 to 500 μg, 3 to 100 μg, 5 to 20 μg, 5 to 100 μg, 50 μg, 100 μg, 150 μg, 200 μg, 250 μg, 300 μg, 350 μg, 400 μg, 450 μg, 500 μg, 550 μg, 600 μg, 650 μg, 700 μg, 750 μg, 800 μg, 850 μg, 900 μg, 950 μg, 1000 μg, 1050 μg, 1100 μg, 1150 μg, 1200 μg, 1250 μg, 1300 μg, 1350 μg, 1400 μg, 1450 μg, 1500 μg, 1550 μg, 1600 μg, 1650 μg, 1700 μg, 1750 μg, 1800 μg, 1850 μg, 1900 μg, 1950 μg, 2000 μg, 2050 μg, 2100 μg, 2150 μg, 2200 μg, 2250 μg, 2300 μg, 2350 μg, 2400 μg, 2450 μg, 2500 μg, 2550 μg, 2600 μg, 2650 μg, 2700 μg, 2750 μg, 2800 μg, 2850 μg, 2900 μg, 2950 μg, 3000 μg, 3250 μg, 3500 μg, 3750 μg, 4000 μg, 4250 μg, 4500 μg, 4750 μg, 5000 μg of a polypeptide or agonist described herein and from 10 mg to 600 mg (e.g. 10 mg, 20 mg, 30 mg, 40 mg, 50 mg, 60 mg, 70 mg, 80 mg, 90 mg, 100 mg, 120 mg, 140 mg, 160 mg, 180 mg, 200 mg, 220 mg, 240 mg, 260 mg, 280 mg, 300 mg, 320 mg, 340 mg, 360 mg, 380 mg, 400 mg, 420 mg, 440 mg, 460 mg, 480 mg, 500 mg, 520 mg, 540 mg, 560 mg, 580 mg, 600 mg) of furosemide (Lasix).

[0496] A dosage unit (e.g. an oral, intravenous or intramuscular dosage unit) can include, for example, from 1 to 30 μg, 1 to 40 μg, 1 to 50 μg, 1 to 100 μg, 1 to 200 μg, 1 to 300 μg, 1 to 400 μg, 1 to 500 μg, 1 to 600 μg, 1 to 700 μg, 1 to 800 μg, 1 to 900 μg, 1 to 1000 μg, 10 to 30 μg, 10 to 40 μg, 10 to 50 μg, 10 to 100 μg, 10 to 200 μg, 10 to 300 μg, 10 to 400 μg, 10 to 500 μg, 10 to 600 μg, 10 to 700 μg, 10 to 800 μg, 10 to 900 μg, 10 to 1000 μg, 100 to 200 μg, 100 to 300 μg, 100 to 400 μg, 100 to 500 μg, 100 to 600 μg, 100 to 700 μg, 100 to 800 μg, 100 to 900 μg, 100 to 1000 μg, 100 to 1250 μg, 100 to 1500 μg, 100 to 1750 μg, 100 to 2000 μg, 100 to 2250 μg, 100 to 2500 μg, 100 to 2750 μg, 100 to 3000 μg, 200 to 300 μg, 200 to 400 μg, 200 to 500 μg, 200 to 600 μg, 200 to 700 μg, 200 to 800 μg, 200 to 900 μg, 200 to 1000 μg, 200 to 1250 μg, 200 to 1500 μg, 200 to 1750 μg, 200 to 2000 μg, 200 to 2250 μg, 200 to 2500 μg, 200 to 2750 μg, 200 to 30001 μg, 300 to 400 μg, 300 to 500 μg, 300 to 600 μg, 300 to 700 μg, 300 to 800 μg, 300 to 900 μg, 300 to 1000 μg, 300 to 1250 μg, 300 to 1500 μg, 300 to 17501 μg, 300 to 2000 μg, 300 to 2250 μg, 300 to 2500 μg, 300 to 2750 μg, 300 to 3000 μg, 400 to 500 μg, 400 to 600 μg, 400 to 700 μg, 400 to 800 μg, 400 to 900 μg, 400 to 1000 μg, 400 to 1250 μg, 400 to 1500 μg, 400 to 1750 μg, 400 to 2000 μg, 400 to 2250 μg, 400 to 2500 μg, 400 to 2750 μg, 400 to 3000 μg, 500 to 600 μg, 500 to 700 μg, 500 to 800 μg, 500 to 900 μg, 500 to 1000 μg, 500 to 1250 μg, 500 to 1500 μg, 500 to 1750 μg, 500 to 2000 μg, 500 to 2250 μg, 500 to 2500 μg, 500 to 2750 μg, 500 to 3000 μg, 600 to 700 μg, 600 to 800 μg, 600 to 900 μg, 600 to 1000 μg, 600 to 1250 μg, 600 to 1500 μg, 600 to 1750 μg, 600 to 2000 μg, 600 to 2250 μg, 600 to 2500 μg, 600 to 2750 μg, 600 to 3000 μg, 700 to 800 μg, 700 to 900 μg, 700 to 1000 μg, 700 to 1250 μg, 700 to 1500 μg, 700 to 1750 μg, 700 to 2000 μg, 700 to 2250 μg, 700 to 2500 μg, 700 to 2750 μg, 700 to 3000 μg, 800 to 900 μg, 800 to 1000 μg, 800 to 1250 μg, 800 to 1500 μg, 800 to 1750 μg, 800 to 2000 μg, 800 to 2250 μg, 800 to 2500 μg, 800 to 2750 μg, 800 to 3000 μg, 900 to 1000 μg, 900 to 1250 μg, 900 to 1500 μg, 900 to 1750 μg, 900 to 2000 μg, 900 to 2250 μg, 900 to 2500 μg, 900 to 2750 μg, 900 to 3000 μg, 1000 to 1250 μg, 1000 to 1500 μg, 1000 to 1750 μg, 1000 to 2000 μg, 1000 to 2250 μg, 1000 to 2500 μg, 1000 to 2750 μg, 1000 to 3000 μg, 2 to 500 μg, 50 to 500 μg, 3 to 100 μg, 5 to 20 μg, 5 to 100 μg, 50 μg, 100 μg, 150 μg, 200 μg, 250 μg, 300 μg, 350 g, 400 μg, 450 μg, 500 μg, 550 μg, 600 μg, 650 μg, 700 μg, 750 μg, 800 μg, 850 μg, 900 μg, 950 μg, 1000 μg, 1050 μg, 1100 μg, 1150 μg, 1200 μg, 1250 μg, 1300 μg, 1350 μg, 1400 μg, 1450 μg, 1500 μg, 1550 μg, 1600 μg, 1650 μg, 1700 μg, 1750 μg, 1800 μg, 1850 μg, 1900 μg, 1950 μg, 2000 μg, 2050 μg, 2100 μg, 2150 μg, 2200 μg, 2250 μg, 2300 μg, 2350 μg, 2400 μg, 2450 μg, 2500 μg, 2550 μg, 2600 μg, 2650 μg, 2700 μg, 2750 μg, 2800 μg, 2850 μg, 2900 μg, 2950 μg, 3000 μg, 3250 μg, 3500 μg, 3750 μg, 4000 μg, 4250 μg, 4500 μg, 4750 μg, 5000 μg of a polypeptide or agonist described herein and from 0.2 mg to 10 mg (e.g. 0.2 mg, 0.4 mg, 0.5 mg, 0.75 mg, 1 mg, 1.5 mg, 2 mg, 2.5 mg, 3 mg, 3.5 mg, 4 mg, 4.5 mg, 5 mg, 5.5 mg, 6 mg, 6.5 mg, 7 mg, 7.5 mg, 8 mg, 8.5 mg, 9 mg, 9.5 mg, 10 mg) of bumetanide (Bumex).

[0497] The precise amount of each of the two or more active ingredients in a dosage unit will depend on the desired dosage of each component. Thus, it can be useful to create a dosage unit that will, when administered according to a particular dosage schedule (e.g., a dosage schedule specifying a certain number of units and a particular timing for administration), deliver the same dosage of each component as would be administered if the patient was being treated with only a single component. In other circumstances, it might be desirable to create a dosage unit that will deliver a dosage of one or more components that is less than that which would be administered if the patient was being treated only with a single component. Finally, it might be desirable to create a dosage unit that will deliver a dosage of one or more components that is greater than that which would be administered if the patient was being treated only with a single component. The pharmaceutical composition can include additional ingredients including but not limited to the excipients described herein. In certain embodiments, one or more therapeutic agents of the dosage unit may exist in an extended or control release formulation and additional therapeutic agents may not exist in extended release formulation. For example, a peptide or agonist described herein may exist in a controlled release formulation or extended release formulation in the same dosage unit with another agent that may or may not be in either a controlled release or extended release formulation. Thus, in certain embodiments, it may be desirable to provide for the immediate release of one or more of the agents described herein, and the controlled release of one or more other agents.

[0498] In certain embodiments the dosage unit and daily dose are equivalent. In certain embodiments the dosage unit and the daily dose are not equivalent. In various embodiments, the dosage unit is administered twenty minutes prior to food consumption, twenty minutes after food consumption, with food at anytime of the day, without food at anytime of the day, with food after an overnight fast (e.g. with breakfast), at bedtime after a low fat snack. In various embodiments, the dosage unit is administered once a day, twice a day, three times a day, four times a day, five times a day, six times a day.

[0499] When two or more active ingredients are combined in single dosage form, chemical interactions between the active ingredients may occur. For example, acidic and basic active ingredients can react with each other and acidic active ingredients can facilitate the degradation of acid labile substances. Thus, in certain dosage forms, acidic and basic substances can be physically separated as two distinct or isolated layers in a compressed tablet, or in the core and shell of a press-coated tablet. Additional agents that are compatible with acidic as well as basic substances, have the flexibility of being placed in either layer. In certain multiple layer compositions at least one active ingredient can be enteric-coated. In certain embodiments thereof at least one active ingredient can be presented in a controlled release form. In certain embodiments where a combination of three or more active substances are used, they can be presented as physically isolated segments of a compressed mutlilayer tablet, which can be optionally film coated.

[0500] The therapeutic combinations described herein can be formulated as a tablet or capsule comprising a plurality of beads, granules, or pellets. All active ingredients including the vitamins of the combination are formulated into granules or beads or pellets that are further coated with a protective coat, an enteric coat, or a film coat to avoid the possible chemical interactions. Granulation and coating of granules or beads is done using techniques well known to a person skilled in the art. At least one active ingredient can present in a controlled release form. Finally these coated granules or beads are filled into hard gelatin capsules or compressed to form tablets.

[0501] The therapeutic combinations described herein can be formulated as a capsule comprising microtablets or minitablets of all active ingredients. Microtablets of the individual agents can be prepared using well known pharmaceutical procedures of tablet making like direct compression, dry granulation or wet granulation. Individual microtablets can be filled into hard gelatin capsules. A final dosage form may comprise one or more microtablets of each individual component. The microtablets may be film coated or enteric coated.

[0502] The therapeutic combinations described herein can be formulated as a capsule comprising one or more microtablets and powder, or one or more microtablets and granules or beads. In order to avoid interactions between drugs, some active ingredients of a said combination can be formulated as microtablets and the others filled into capsules as a powder, granules, or beads. The microtablets may be film coated or enteric coated. At least one active ingredient can be presented in controlled release form.

[0503] The therapeutic combinations described herein can be formulated wherein the active ingredients are distributed in the inner and outer phase of tablets. In an attempt to divide chemically incompatible components of proposed combination, few interacting components are converted in granules or beads using well known pharmaceutical procedures in prior art. The prepared granules or beads (inner phase) are then mixed with outer phase comprising the remaining active ingredients and at least one pharmaceutically acceptable excipient. The mixture thus comprising inner and outer phase is compressed into tablets or molded into tablets. The granules or beads can be controlled release or immediate release beads or granules, and can further be coated using an enteric polymer in an aqueous or non-aqueous system, using methods and materials that are known in the art.

[0504] The therapeutic combinations described herein can be formulated as single dosage unit comprising suitable buffering agent. All powdered ingredients of said combination are mixed and a suitable quantity of one or more buffering agents is added to the blend to minimize possible interactions.

[0505] The agents described herein, alone or in combination, can be combined with any pharmaceutically acceptable carrier or medium. Thus, they can be combined with materials that do not produce an adverse, allergic or otherwise unwanted reaction when administered to a patient. The carriers or mediums used can include solvents, dispersants, coatings, absorption promoting agents, controlled release agents, and one or more inert excipients (which include starches, polyols, granulating agents, microcrystalline cellulose, diluents, lubricants, binders, disintegrating agents, and the like), etc. If desired, tablet dosages of the disclosed compositions may be coated by standard aqueous or nonaqueous techniques.

### Analgesic Agents in Combitherapy

[0506] The peptides and agonists described herein can be used in combination therapy with an analgesic agent, e.g., an analgesic compound or an analgesic peptide. These peptides and compounds can be administered with the peptides of the invention (simultaneously or sequentially). They can also be optionally covalently linked or attached to an agent described herein to create therapeutic conjugates. Among the useful analgesic agents are: Ca channel blockers, 5HT receptor antagonists (for example 5HT3, 5HT4 and 5HT1 receptor antagonists), opioid receptor agonists (loperamide, fedotozine, and fentanyl), NK1 receptor antagonists, CCK receptor agonists (e.g., loxiglumide), NK1 receptor antagonists, NK3 receptor antagonists, norepinephrine-serotonin reuptake inhibitors (NSR1), vanilloid and cannabanoid receptor agonists, and sialorphin. Analgesics agents in the various classes are described in the literature.

[0507] Among the useful analgesic peptides are sialorphin-related peptides, including those comprising the amino acid sequence QHNPR (SEQ ID NO:), including: VQHNPR (SEQ ID NO:); VRQHINPR (SEQ ID NO:); VRGQHINPR (SEQ ID NO:); VRGPQHINPR (SEQ ID NO:); VRGPRQHINPR (SEQ ID NO:); VRGPRRQHINPR (SEQ ID NO:); and RQHNPR (SEQ ID NO:). Sialorphin-related peptides bind to neprilysin and inhibit neprilysin-mediated breakdown of substance P and Met-enkephalin. Thus, compounds or peptides that are inhibitors of neprilysin are useful analgesic agents which can be administered with the peptides of the invention in a co-therapy or linked to the peptides of the invention, e.g., by a covalent bond. Sialophin and related peptides are described in U.S. Pat. No. 6,589,750; U.S. 20030078200 A1; and WO 02/051435 A2.

[0508] Opioid receptor antagonists and agonists can be administered with the peptides of the invention in co-therapy or linked to the agent of the invention, e.g., by a covalent bond. For example, opioid receptor antagonists such as naloxone, naltrexone, methyl nalozone, nalmefene, cypridime, beta funaltrexamine, naloxonazine, naltrindole, and nor-binaltorphimine are thought to be useful in the treatment of IBS. It can be useful to formulate opioid antagonists of this type is a delayed and sustained release formulation such that initial release of the antagonist is in the mid to distal small intestine and/or ascending colon. Such antagonists are described in WO 01/32180 A2. Enkephalin pentapeptide (HOE825; Tyr-D-Lys-Gly-Phe-L-homoserine) is an agonist of the mu and delta opioid receptors and is thought to be useful for increasing intestinal motility (Eur. J. Pharm. 219:445, 1992), and this peptide can be used in conjunction with the peptides of the invention. Also useful is trimebutine which is thought to bind to mu/delta/kappa opioid receptors and activate release of motilin and modulate the release of gastrin, vasoactive intestinal peptide, gastrin and glucagons. Kappa opioid receptor agonists such as fedotozine, asimadoline, and ketocyclazocine, and compounds described in WO03/097051 and WO05/007626 can be used with or linked to the peptides of the invention. In addition, mu opioid receptor agonists such as morphine, diphenyloxylate, frakefamide (H-Tyr-D-Ala-Phe(F)-Phe-NH₂; WO 01/019849 A1) and loperamide can be used.

[0509] Tyr-Arg (kyotorphin) is a dipeptide that acts by stimulating the release of met-enkephalins to elicit an analgesic effect (J. Biol. Chem. 262:8165, 1987). Kyotorphin can be used with or linked to the peptides of the invention. Chromogranin-derived peptide (CgA 47-66; see, e.g., Ghia et al. 2004 Regulatory Peptides 119:199) can be used with or linked to the peptides of the invention.

[0510] CCK receptor agonists such as caerulein from amphibians and other species are useful analgesic agents that can be used with or linked to the peptides of the invention.

[0511] Conotoxin peptides represent a large class of analgesic peptides that act at voltage gated Ca channels, NMDA receptors or nicotinic receptors. These peptides can be used with or linked to the peptides of the invention.

[0512] Peptide analogs of thymulin (FR Application 2830451) can have analgesic activity and can be used with or linked to the peptides of the invention.

[0513] CCK (CCKa or CCKb) receptor antagonists, including loxiglumide and dexloxiglumide (the R-isomer of loxiglumide) (WO 88/05774) can have analgesic activity and can be used with or linked to the peptides of the invention.

[0514] Other useful analgesic agents include 5-HT4 agonists such as tegaserod (Zelnorm®), mosapride, metoclopramide, zacopride, cisapride, renzapride, benzimidazolone derivatives such as BIMU 1 and BIMU 8, and lirexapride. Such agonists are described in: EP1321142 A1, WO 03/053432A1, EP 505322 A1, EP 505322 B1, U.S. Pat. No. 5,510,353, EP 507672 A1, EP 507672 B1, and U.S. Pat. No. 5,273,983.

[0515] Calcium channel blockers such as ziconotide and related compounds described in, for example, EP625162B1, U.S. Pat. No. 5,364,842, U.S. Pat. No. 5,587,454, U.S. Pat. No. 5,824,645, U.S. Pat. No. 5,859,186, U.S. Pat. No. 5,994,305, U.S. Pat. No. 6,087,091, U.S. Pat. No. 6,136,786, WO 93/13128 A1, EP 1336409 A1, EP 835126 A1, EP 835126 B1, U.S. Pat. No. 5,795,864, U.S. Pat. No. 5,891,849, U.S. Pat. No. 6,054,429, WO 97/01351 A1, can be used with or linked to the peptides of the invention.

[0516] Various antagonists of the NK-1, NK-2, and NK-3 receptors (for a review see Giardina et al. 2003 Drugs 6:758) can be can be used with or linked to the peptides of the invention.

[0517] NK1 receptor antagonists such as: aprepitant (Merck & Co Inc), vofopitant, ezlopitant (Pfizer, Inc.), R-673 (Hoffmann-La Roche Ltd), SR-48968 (Sanofi Synthelabo), CP-122,721 (Pfizer, Inc.), GW679769 (Glaxo Smith Kline), TAK-637 (Takeda/Abbot), SR-14033, and related compounds described in, for example, EP 873753 A1, US 20010006972 A1, US 20030109417 A1, WO 01/52844 A1, can be used with or linked to the peptides of the invention.

[0518] NK-2 receptor antagonists such as nepadutant (Menarini Ricerche SpA), saredutant (Sanofi-Synthelabo), GW597599 (Glaxo Smith Kline), SR-144190 (Sanofi-Synthelabo) and UK-290795 (Pfizer Inc) can be used with or linked to the peptides of the invention.

[0519] NK3 receptor antagonists such as osanetant (SR-142801; Sanofi-Synthelabo), SSR-241586, talnetant and related compounds described in, for example, WO 02/094187 A2, EP 876347 A1, WO 97/21680 A1, U.S. Pat. No. 6,277,862, WO 98/11090, WO 95/28418, WO 97/19927, and Boden et al. (J Med. Chem. 39:1664-75, 1996) can be used with or linked to the peptides of the invention.

[0520] Norepinephrine-serotonin reuptake inhibitors (NSR1) such as milnacipran and related compounds described in WO 03/077897 A1 can be used with or linked to the peptides of the invention.

[0521] Vanilloid receptor antagonists such as arvanil and related compounds described in WO 01/64212 A1 can be used with or linked to the peptides of the invention.

[0522] The analgesic peptides and compounds can be administered with the peptides and agonists of the invention (simultaneously or sequentially). The analgesic agents can also be covalently linked to the peptides and agonists of the invention to create therapeutic conjugates. Where the analgesic is a peptide and is covalently linked to an agent described herein the resulting peptide may also include at least one trypsin cleavage site. When present within the peptide, the analgesic peptide may be preceded by (if it is at the carboxy terminus) or followed by (if it is at the amino terminus) a trypsin cleavage site that allows release of the analgesic peptide.

[0523] In addition to sialorphin-related peptides, analgesic peptides include: AspPhe, endomorphin-1, endomorphin-2, nocistatin, dalargin, lupron, ziconotide, and substance P.

### Diabetes, Obesity and Other Disorders

[0524] Pharmaceutical compositions comprising at least two of: 1) an agent that stimulates the production of cAMP (e.g., glucagon-like peptide 1 (GLP-1)); 2) an agent that inhibits the degradation of a cyclic nucleotide (e.g., a phosphodiesterase inhibitor); and 3) a peptide or agonist of the invention useful for treating diabetes and obesity. Such compositions may also be useful for treating secondary hyperglycemias in connection with pancreatic diseases (chronic pancreatitis, pancreasectomy, hemochromatosis) or endocrine diseases (acromegaly, Cushing's syndrome, pheochromocytoma or hyperthyreosis), drug-induced hyperglycemias (benzothiadiazine saluretics, diazoxide or glucocorticoids), pathologic glucose tolerance, hyperglycemias, dyslipoproteinemias, adiposity, hyperlipoproteinemias and/or hypotensions.

[0525] The phosphodiesterase inhibitor can be specific for a particular phosphodiesterase (e.g., Group III or Group IV) or a non-specific phosphodiesterase inhibitor, such as papaverine, theophylline, enprofyllines and/or IBMX. Specific phosphodiesterase inhibitors which inhibit group III phosphodiesterases (cGMP-inhibited phosphodiesterases), including indolidane (LY195115), cilostamide (OPC 3689), lixazinone (RS 82856), Y-590, imazodane (CI914), SKF 94120, quazinone, ICI 153,110, cilostazole, bemorandane (RWJ 22867), siguazodane (SK&F 94-836), adibendane (BM 14,478), milrinone (WIN 47203), enoximone (MDL 17043), pimobendane (UD-CG 115), MC1-154, saterinone (BDF 8634), sulmazole (ARL 115), UD-CG 212, motapizone, piroximone, and ICI 118233 can be useful. In addition, phosphodiesterase inhibitors which inhibit group IV phosphodiesterases (cAMP-specific phosphodiesterases), such as rolipram ZK 62711; pyrrolidone), imidazolidinone (RO 20-1724), etazolate (SQ 65442), denbufylline (BRL 30892), IC163197, and RP73401 can be used.

### Other Agents for Use in Combitherapy

[0526] Also within the invention are pharmaceutical compositions comprising a peptide or agonists of the invention and a second therapeutic agent. The second therapeutic agent can be administered to treat any condition for which it is useful, including conditions that are not considered to be the primary indication for treatment with the second therapeutic agent. The second therapeutic agent can be administered simultaneously or sequentially. The second therapeutic agent can be covalently linked to the peptides and agonists of the invention to create a therapeutic conjugate. When the second therapeutic agent is another peptide, a linker including those described herein may be used between the peptide of the invention and the second therapeutic peptide.

[0527] Examples of additional therapeutic agents to treat gastrointestinal and other disorders include: agents to treat constipation (e.g., a chloride channel activator such as the bicylic fatty acid, Lubiprostone (formerly known as SPI-0211; Sucampo Pharmaceuticals, Inc.; Bethesda, Md.), a laxative (e.g. a bulk-forming laxative (e.g. nonstarch polysaccharides, Colonel Tablet (polycarbophil calcium), Plantago Ovata®, Equalactin® (Calcium Polycarbophil)), fiber (e.g. FIBERCON® (Calcium Polycarbophil), an osmotic laxative, a stimulant laxative (such as diphenylmethanes (e.g. bisacodyl), anthraquinones (e.g. cascara, senna), and surfactant laxatives (e.g. castor oil, docusates), an emollient/lubricating agent (such as mineral oil, glycerine, and docusates), MiraLax (Braintree Laboratories, Braintree MA), dexloxiglumide (Forest Laboratories, also known as CR 2017 Rottapharm (Rotta Research Laboratorium SpA)), saline laxatives, enemas, suppositories, and CR 3700 (Rottapharm (Rotta Research Laboratorium SpA);

acid reducing agents such as proton pump inhibitors (e.g., omeprazole (Prilosec®), esomeprazole (Nexium®), lansoprazole (Prevacid®), pantoprazole (Protonix®) and rabeprazole (Aciphex®)) and Histamine H2-receptor antagonist (also known as H2 receptor blockers including cimetidine, ranitidine, famotidine and nizatidine);
prokinetic agents including itopride, octreotide, bethanechol, metoclopramide (Reglan®), domperidone (Motilium®), erythromycin (and derivatives thereof) or cisapride (Propulsid®);
Prokineticin polypeptides homologs, variants and chimeras thereof including those described in U.S. Pat. No. 7,052,674 which can be used with or linked to the polypeptides described herein;
pro-motility agents such as the vasostatin-derived peptide, chromogranin A (4-16) (see, e.g., Ghia et al. 2004 Regulatory Peptides 121:31) or motilin agonists (e.g., GM-611 or mitemcinal fumarate) or nociceptin/Orphanin FQ receptor modulators (US20050169917);
other peptides which can bind to and/or activate GC-C including those described in US20050287067;
complete or partial 5HT (e.g. 5HT1, 5HT2, 5HT3, 5HT4) receptor agonists or antagonists (including 5HT1A antagonists (e.g. AGI-001 (AGI therapeutics), 5HT2B antagonists (e.g. PGN1091 and PGN1164 (Pharmagene Laboratories Limited), and 5HT4 receptor agonists (such as tegaserod (ZELNORM®), prucalopride, mosapride, metoclopramide, zacopride, cisapride, renzapride, benzimidazolone derivatives such as BIMU 1 and BIMU 8, and lirexapride). Such agonists/modulatos are described in: EP1321142 A1, WO 03/053432A1, EP 505322 A1, EP 505322 B1, U.S. Pat. No. 5,510,353, EP 507672 A1, EP 507672 B1, U.S. Pat. No. 5,273,983, and U.S. Pat. No. 6,951,867); 5HT3 receptor agonists such as MKC-733; and 5HT3 receptor antagonists such as DDP-225 (MC1-225; Dynogen Pharmaceuticals, Inc.), cilansetron (Calmactin®), alosetron (Lotronex®), Ondansetron HCl (Zofran®), Dolasetron (ANZEMET®), palonosetron (Aloxi®), Granisetron (Kytril®), YM060(ramosetron; Astellas Pharma Inc.; ramosetron may be given as a daily dose of 0.002 to 0.02 mg as described in EP01588707) and ATI-7000 (Aryx Therapeutics, Santa Clara Calif.);
muscarinic receptor agonists;
anti-inflammatory agents;
antispasmodics including but not limited to anticholinergic drugs (like dicyclomine (e.g. Colimex®, Formulex®, Lomine®, Protylol®, Viscerol®, Spasmoban®, Bentyl®, Bentylol®), hyoscyamine (e.g. IB-Stat®, Nulev®, Levsin®, Levbid®, Levsinex Timecaps®, Levsin/SL®, Anaspaz®, A-Spas S/L®, Cystospaz®, Cystospaz-M®, Donnamar®, Colidrops Liquid Pediatric®, Gastrosed®, Hyco Elixir®, Hyosol®, Hyospaz®, Hyosyne®, Losamine®, Medispaz®, Neosol®, Spacol®, Spasdel®, Symax®, Symax SL®), Donnatal (e.g. Donnatal Extentabs®), clidinium (e.g. Quarzan, in combination with Librium=Librax), methantheline (e.g. Banthine), Mepenzolate (e.g. Cantil), homatropine (e.g. hycodan, Homapin), Propantheline bromide (e.g. Pro-Banthine), Glycopyrrolate (e.g. Robinul®, Robinul Forte®), scopolamine (e.g. Transderm-Scop®, Transderm-V®), hyosine-N-butylbromide (e.g. Buscopan®), Pirenzepine (e.g. Gastrozepin®) Propantheline Bromide (e.g. Propanthel®), dicycloverine (e.g. Merbentyl®), glycopyrronium bromide (e.g. Glycopyrrolate®), hyoscine hydrobromide, hyoscine methobromide, methanthelinium, and octatropine); peppermint oil; and direct smooth muscle relaxants like cimetropium bromide, mebeverine (DUSPATAL®, DUSPATALIN®, COLOFAC MR®, COLOTAL®), otilonium bromide (octilonium), pinaverium (e.g. Dicetel® (pinaverium bromide; Solvay S.A.)), Spasfon® (hydrated phloroglucinol and trimethylphloroglucinol) and trimebutine (including trimebutine maleate (Modulon®);
antidepressants, including but not limited to those listed herein, as well as tricyclic antidepressants like amitriptyline (Elavil®), desipramine (Norpramin®), imipramine (Tofranil®), amoxapine (Asendin®), nortriptyline; the selective serotonin reuptake inhibitors (SSRI's) like paroxetine (Paxil®), fluoxetine (Prozac®), sertraline (Zoloft®), and citralopram (Celexa®); and others like doxepin (Sinequan®) and trazodone (Desyrel®);
centrally-acting analgesic agents such as opioid receptor agonists, opioid receptor antagonists (e.g., naltrexone);
agents for the treatment of Inflammatory bowel disease;
agents for the treatment of Crohn's disease and/or ulcerative colitis (e.g., alequel (Enzo Biochem, Inc.; Farmingsale, N.Y.), the anti-inflammatory peptide RDP58 (Genzyme, Inc.; Cambridge, Mass.), and TRAFICET_EN™ (ChemoCentryx, Inc.; San Carlos, Calif.);
agents that treat gastrointestinal or visceral pain;
agents that increase cGMP levels (as described in US20040121994) like adrenergic receptor antagonists, dopamine receptor agonists and PDE (phosphodiesterase) inhibitors including but not limited to those disclosed herein;
purgatives that draw fluids to the intestine (e.g., VISICOL®, a combination of sodium phosphate monobasic monohydrate and sodium phosphate dibasic anhydrate);
Corticotropin Releasing Factor (CRF) receptor antagonists (including NBI-34041 (Neurocrine Biosciences, San Diego, Calif.), CRH9-41, astressin, R121919 (Janssen Pharmaceutica), CP154,526, NBI-27914, Antalarmin, DMP696 (Bristol-Myers Squibb) CP-316,311 (Pfizer, Inc.), SB723620 (GSK), GW876008 (Neurocrine/Glaxo Smith Kline), ONO-2333Ms (Ono Pharmaceuticals), TS-041 (Janssen), AAG561 (Novartis) and those disclosed in U.S. Pat. No. 5,063,245, U.S. Pat. No. 5,861,398, US20040224964, US20040198726, US20040176400, US20040171607, US20040110815, US20040006066, and US20050209253);
glucagon-like peptides (glp-1) and analogues thereof (including exendin-4 and GTP-010 (Gastrotech Pharma A)) and inhibitors of DPP-IV (DPP-IV mediates the inactivation of glp-1);
tofisopam, enantiomerically-pure R-tofisopam, and pharmaceutically-acceptable salts thereof (US 20040229867);
tricyclic anti-depressants of the dibenzothiazepine type including but not limited to Dextofisopam® (Vela Pharmaceuticals), tianeptine (Stablon®) and other agents described in U.S. Pat. No. 6,683,072;
(E)-4 (1,3bis(cyclohexylmethyl)-1,2,34,-tetrahydro-2,6-diono-9H-purin-8-yl)cinnamic acid nonaethylene glycol methyl ether ester and related compounds described in WO 02/067942;
the probiotic PROBACTRIX® (The BioBalance Corporation; New York, N.Y.) which contains microorganisms useful in the treatment of gastrointestinal disorders;
antidiarrheal drugs including but not limited to loperamide (Imodium, Pepto Diarrhea), diphenoxylate with atropine (Lomotil, Lomocot), cholestyramine (Questran, Cholybar), atropine (Co-Phenotrope, Diarsed, Diphenoxylate, Lofene, Logen, Lonox, Vi-Atro, atropine sulfate injection) and Xifaxan® (rifaximin; Salix Pharmaceuticals Ltd), TZP-201(Tranzyme Pharma Inc.), the neuronal acetylcholine receptor (nAChR) blocker AGI-004 (AGI therapeutics), and bismuth subsalicylate (Pepto-bismol);
anxiolytic drugs including but not limited toAtivan (lorazepam), alprazolam (Xanax®), chlordiazepoxide/clidinium (Librium®, Librax®), clonazepam (Klonopin®), clorazepate (Tranxene®), diazepam (Valium®), estazolam (ProSom®), flurazepam (Dalmane®), oxazepam (Serax®), prazepam (Centrax®), temazepam (Restoril®), triazolam (Halcion®;
Bedelix® (Montmorillonite beidellitic; Ipsen Ltd), Solvay SLV332 (ArQule Inc), YKP (SK Pharma), Asimadoline (Tioga Pharmaceuticals/Merck), AGI-003 (AGI Therapeutics);
neurokinin antagonists including those described in US20060040950;
potassium channel modulators including those described in U.S. Pat. No. 7,002,015;
the serotonin modulator AZD7371 (AstraZeneca Plc);
M3 muscarinic receptor antagonists such as darifenacin (Enablex; Novartis AG and zamifenacin (Pfizer);
herbal and natural therapies including but not limited to acidophilus, chamomile tea, evening primrose oil, fennel seeds, wormwood, comfrey, and compounds of Bao-Ji-Wan (magnolol, honokiol, imperatorin, and isoimperatorin) as in U.S. Pat. No. 6,923,992; and
compositions comprising lysine and an anti-stress agent for the treatment of irritable bowel syndrome as described in EP01550443.

[0528] The peptides and agonists described herein can be used in combination therapy with insulin and related compounds including primate, rodent, or rabbit insulin including biologically active variants thereof including allelic variants, more preferably human insulin available in recombinant form. Sources of human insulin include pharmaceutically acceptable and sterile formulations such as those available from Eli Lilly (Indianapolis, Ind. 46285) as Humulin™ (human insulin rDNA origin). See the THE PHYSICIAN'S DESK REFERENCE, 55.sup.th Ed. (2001) Medical Economics, Thomson Healthcare (disclosing other suitable human insulins). The peptides and agonists described herein can also be used in combination therapy with agents that can boost insulin effects or levels of a subject upon administration, e.g. glipizide and/or rosiglitazone. The peptides and agonistsdescribed herein can be used in combitherapy with SYMLIN® (pramlintide acetate) and Exenatide® (synthetic exendin-4; a 39 aa peptide).

[0529] The peptides and agonists described herein can also be used in combination therapy with agents (e.g., Entereg™ (alvimopan; formerly called adolor/ADL 8-2698), conivaptan and related agents describe in U.S. Pat. No. 6,645,959) used for the treatment of postoperative ileus and other disorders.

[0530] The peptides and agonists described herein can be used in combination therapy with an anti-hypertensive agent including but not limited to:

[0531] (1) diuretics, such as thiazides, including chlorthalidone, chlorthiazide, dichlorophenamide, hydroflumethiazide, indapamide, polythiazide, and hydrochlorothiazide; loop diuretics, such as bumetanide, ethacrynic acid, furosemide, and torsemide; potassium sparing agents, such as amiloride, and triamterene; carbonic anhydrase inhibitors, osmotics (such as glycerin) and aldosterone antagonists, such as spironolactone, epirenone, and the like;

[0532] (2) beta-adrenergic blockers such as acebutolol, atenolol, betaxolol, bevantolol, bisoprolol, bopindolol, carteolol, carvedilol, celiprolol, esmolol, indenolol, metaprolol, nadolol, nebivolol, penbutolol, pindolol, propanolol, sotalol, tertatolol, tilisolol, and timolol, and the like;

[0533] (3) calcium channel blockers such as amlodipine, aranidipine, azelnidipine, barnidipine, benidipine, bepridil, cinaldipine, clevidipine, diltiazem, efonidipine, felodipine, gallopamil, isradipine, lacidipine, lemildipine, lercanidipine, nicardipine, nifedipine, nilvadipine, nimodepine, nisoldipine, nitrendipine, manidipine, pranidipine, and verapamil, and the like;

[0534] (4) angiotensin converting enzyme (ACE) inhibitors such as benazepril; captopril; ceranapril; cilazapril; delapril; enalapril; enalopril; fosinopril; imidapril; lisinopril; losinopril; moexipril; quinapril; quinaprilat; ramipril; perindopril; perindropril; quanipril; spirapril; tenocapril; trandolapril, and zofenopril, and the like;

[0535] (5) neutral endopeptidase inhibitors such as omapatrilat, cadoxatril and ecadotril, fosidotril, sampatrilat, AVE7688, ER4030, and the like;

[0536] (6) endothelin antagonists such as tezosentan, A308165, and YM62899, and the like;

[0537] (7) vasodilators such as hydralazine, clonidine, minoxidil, and nicotinyl alcohol, and the like;

[0538] (8) angiotensin II receptor antagonists such as aprosartan, candesartan, eprosartan, irbesartan, losartan, olmesartan, pratosartan, tasosartan, telmisartan, valsartan, and EXP-3137, F16828K, and RNH6270, and the like;

[0539] (9) α/β adrenergic blockers such as nipradilol, arotinolol and amosulalol, and the like;

[0540] (10) alpha 1 blockers, such as terazosin, urapidil, prazosin, tamsulosin, bunazosin, trimazosin, doxazosin, naftopidil, indoramin, WHP 164, and XEN010, and the like;

[0541] (11) alpha 2 agonists such as lofexidine, tiamenidine, moxonidine, rilmenidine and guanobenz, and the like;

[0542] (12) aldosterone inhibitors, and the like; and

[0543] (13) angiopoietin-2-binding agents such as those disclosed in WO03/030833.

[0544] Specific anti-hypertensive agents that can be used in combination with peptides and agonists described herein include, but are not limited to:

diuretics, such as thiazides (e.g., chlorthalidone, cyclothiazide (CAS RN 2259-96-3), chlorothiazide (CAS RN 72956-09-3, which may be prepared as disclosed in US2809194), dichlorophenamide, hydroflumethiazide, indapamide, polythiazide, bendroflumethazide, methyclothazide, polythiazide, trichlormethazide, chlorthalidone, indapamide, metolazone, quinethazone, althiazide (CAS RN 5588-16-9, which may be prepared as disclosed in British Patent No. 902,658), benzthiazide (CAS RN 91-33-8, which may be prepared as disclosed in U.S. Pat. No. 3,108,097), buthiazide (which may be prepared as disclosed in British Patent Nos. 861,367), and hydrochlorothiazide), loop diuretics (e.g. bumetanide, ethacrynic acid, furosemide, and torasemide), potassium sparing agents (e.g. amiloride, and triamterene (CAS Number 396-01-0)), and aldosterone antagonists (e.g. spironolactone (CAS Number 52-01-7), epirenone, and the like); β-adrenergic blockers such as Amiodarone (Cordarone, Pacerone), bunolol hydrochloride (CAS RN 31969-05-8, Parke-Davis), acebutolol (±N-[3-Acetyl-4-[2-hydroxy-3-[(1 methylethyl)amino]propoxy]phenyl]-butanamide, or (±)-3′-Acetyl-4′-[2-hydroxy-3-(isopropylamino)propoxy]butyranilide), acebutolol hydrochloride (e.g. Sectral®, Wyeth-Ayerst), alprenolol hydrochloride (CAS RN 13707-88-5 see Netherlands Patent Application No. 6,605,692), atenolol (e.g. Tenormin®, AstraZeneca), carteolol hydrochloride (e.g. Cartrol® Filmtab®, Abbott), Celiprolol hydrochloride (CAS RN 57470-78-7, also see in U.S. Pat. No. 4,034,009), cetamolol hydrochloride (CAS RN 77590-95-5, see also U.S. Pat. No. 4,059,622), labetalol hydrochloride (e.g. Normodyne®, Schering), esmolol hydrochloride (e.g. Brevibloc®, Baxter), levobetaxolol hydrochloride (e.g. Betaxon™ Ophthalmic Suspension, Alcon), levobunolol hydrochloride (e.g. Betagan® Liquifilm® with C CAP® Compliance Cap, Allergan), nadolol (e.g. Nadolol, Mylan), practolol (CAS RN 6673-35-4, see also U.S. Pat. No. 3,408,387), propranolol hydrochloride (CAS RN 318-98-9), sotalol hydrochloride (e.g. Betapace AF™, Berlex), timolol (2-Propanol,1-[(1,1-dimethylethyl)amino]-3-[[4-4(4-morpholinyl)-1,2,5-thiadiazol-3-yl]oxy]-, hemihydrate, (S)-, CAS RN 91524-16-2), timolol maleate (S)-1-[(1,1-dimethylethyl)amino]-3-[[4-(4-morpholinyl)-1,2,5-thiadiazol-3-yl]oxy]-2-propanol (Z)-2-butenedioate (1:1) salt, CAS RN 26921-17-5), bisoprolol (2-Propanol, 1-[4-[[2-(1-methylethoxy)ethoxy]-methyl]phenoxyl]-3-[(1-meth-ylethyl)amino]-, CAS RN 66722-44-9), bisoprolol fumarate (such as (±)-1-[4-[[2-(1-Methylethoxy)ethoxy]methyl]phenoxy]-3-[(1-methylethyl)amino]-2-propanol (E)-2-butenedioate (2:1) (salt), e.g., Zebeta™, Lederle Consumer), nebivalol (2H-1-Benzopyran-2-methanol, αα′-[iminobis(methylene)]bis[6-fluoro-3,4-dihydro-, CAS RN 99200-09-6 see also U.S. Pat. No. 4,654,362), cicloprolol hydrochloride, such 2-Propanol, 1-[4-[2-(cyclopropylmethoxy)ethoxy]phenoxy]-3-[1-methylethyl)amino]-, hydrochloride, A.A.S. RN 63686-79-3), dexpropranolol hydrochloride (2-Propanol,1-[1-methylethyl)-amino]-3-(1-naphthalenyloxy)-hydrochloride (CAS RN 13071-11-9), diacetolol hydrochloride (Acetamide, N-[3-acetyl-4-[2-hydroxy-3-[(1-methyl-ethyl)amino]propoxy][phenyl]-, monohydrochloride CAS RN 69796-04-9), dilevalol hydrochloride (Benzamide, 2-hydroxy-5-[1-hydroxy-2-[1-methyl-3-phenylpropyl)amino]ethyl]-, monohydrochloride, CAS RN 75659-08-4), exaprolol hydrochloride (2-Propanol, 1-(2-cyclohexylphenoxy)-3-[(1-methylethyl)amino]-, hydrochloride CAS RN 59333-90-3), flestolol sulfate (Benzoic acid, 2-fluoro-,3-[[2-[aminocarbonyl)amino]-1-dimethylethyl]amino]-2-hydroxypropyl ester, (±)-sulfate (1:1) (salt), CAS RN 88844-73-9; metalol hydrochloride (Methanesulfonamide, N-[4-[1-hydroxy-2-(methylamino)propyl]phenyl}-, monohydrochloride CAS RN 7701-65-7), metoprolol 2-Propanol, 1-[4-(2-methoxyethyl)phenoxy]-3-[1-methylethyl)amino]-; CAS RN 37350-58-6), metoprolol tartrate (such as 2-Propanol, 1-[4-(2-methoxyethyl)phenoxy]-3-[(1-methylethyl)amino]-, e.g., Lopressor®, Novartis), pamatolol sulfate (Carbamic acid, [2-[4-[2-hydroxy-3-[(1-methylethyl)amino]propoxyl]phenyl}-ethyl]-, methyl ester, (±) sulfate (salt) (2:1), CAS RN 59954-01-7), penbutolol sulfate (2-Propanol, 1-(2-cyclopentylphenoxy)-3-[1,1-dimethylethyl)amino]1, (S)-, sulfate (2:1) (salt), CAS RN 38363-32-5), practolol (Acetamide, N-[4-[2-hydroxy-3-[(1-methylethyl)amino]-propoxy]phenyl]-, CAS RN 6673-35-4;) tiprenolol hydrochloride (Propanol, 1-[(1-methylethyl)amino]-3-[2-(methylthio)-phenoxy]-, hydrochloride, (±), CAS RN 39832-43-4), tolamolol (Benzamide, 4-[2-[[2-hydroxy-3-(2-methylphenoxy)-propyl]amino]ethoxyl]-, CAS RN 38103-61-6), bopindolol, indenolol, pindolol, propanolol, tertatolol, and tilisolol, and the like; calcium channel blockers such as besylate salt of amlodipine (such as 3-ethyl-5-methyl-2-(2-aminoethoxymethyl)-4-(2-chlorophenyl)-1,4-dihydro-6-methyl-3,5-pyridinedicarboxylate benzenesulphonate, e.g., Norvasc®, Pfizer), clentiazem maleate (1,5-Benzothiazepin-4(5H)-one, 3-(acetyloxy)-8-chloro-5-[2-(dimethylamino)ethyl]-2,3-dihydro-2-(4-methoxyphenyl)-(2S-cis)-, (Z)-2-butenedioate (1:1), see also U.S. Pat. No. 4,567,195), isradipine (3,5-Pyridinedicarboxylic acid, 4-(4-benzofurazanyl)-1,4-dihydro-2,6-dimethyl-, methyl 1-methylethyl ester, (±)-4(4-benzofurazanyl)-1,4-dihydro-2,6-dimethyl-3,5-pyridinedicarboxylate, see also U.S. Pat. No. 4,466,972); nimodipine (such as is isopropyl (2-methoxyethyl) 1,4-dihydro-2,6-dimethyl-4-(3-nitrophenyl)-3,5-pyridine-dicarboxylate, e.g. Nimotop®, Bayer), felodipine (such as ethyl methyl 4-(2,3-dichlorophenyl)-1,4-dihydro-2,6-dimethyl-3,5-pyridinedicarboxylate-, e.g. Plendil® Extended-Release, AstraZeneca LP), nilvadipine (3,5-Pyridinedicarboxylic acid, 2-cyano-1,4-dihydro-6-methyl-4-(3-nitrophenyl)-,3-methyl 5-(1-methylethyl)ester, also see U.S. Pat. No. 3,799,934), nifedipine (such as 3,5-pyridinedicarboxylic acid, 1,4-dihydro-2,6-dimethyl-4-(2-nitrophenyl)-, dimethyl ester, e.g., Procardia XL® Extended Release Tablets, Pfizer), diltiazem hydrochloride (such as 1,5-Benzothiazepin-4(5H)-one,3-(acetyloxy)-5 [2-(dimethylamino)ethyl]-2,-3-dihydro-2(4-methoxyphenyl)-, monohydrochloride, (+)-cis., e.g., Tiazac®, Forest), verapamil hydrochloride (such as benzeneacetronitrile, (alpha)-[[3-[[2-(3,4-dimethoxyphenyl)ethyl]methylamino]propyl]-3,4-dimethoxy-(alpha)-(1-methylethyl)hydrochloride, e.g., Isoptin® SR, Knoll Labs), teludipine hydrochloride (3,5-Pyridinedicarboxylic acid, 2-[(dimethylamino)methyl]4-[2-[(1E)-3-(1,1-dimethylethoxy)-3-oxo-1-propenyl]phenyl}-1,4-dihydro-6-methyl-, diethyl ester, monohydrochloride) CAS RN 108700-03-4), belfosdil (Phosphonic acid, [2-(2-phenoxyethyl)-1,3-propane-diyl]bis-, tetrabutyl ester CAS RN 103486-79-9), fostedil (Phosphonic acid, [[4-(2-benzothiazolyl)phenyl]methyl]-, diethyl ester CAS RN 75889-62-2), aranidipine, azelnidipine, bamidipine, benidipine, bepridil, cinaldipine, clevidipine, efonidipine, gallopamil, lacidipine, lemildipine, lercanidipine, monatepil maleate (1-piperazinebutanamide, N-(6,1-dihydrodibenzo(b,e)thiepin-11-yl)-4-(4-fluorophenyl)-, (±)-, (Z)-2-butenedioate (1:1) (±)-N-(6,1,1-Dihydrodibenzo(b,e)thiep-in-11-yl)-4-(p-fluorophenyl)-1-piperazinebutyramide maleate (1:1) CAS RN 132046-06-1), nicardipine, nisoldipine, nitrendipine, manidipine, pranidipine, and the like; T-channel calcium antagonists such as mibefradil; angiotensin converting enzyme (ACE) inhibitors such as benazepril, benazepril hydrochloride (such as 3-[[1-(ethoxycarbonyl)-3-phenyl-(1S)-propyl]amino]-2,3,4,5-tetrahydro-2-oxo-1H-1-(3S)-benzazepine-1-acetic acid monohydrochloride, e.g., Lotrel®, Novartis), captopril (such as 1-[(2S)-3-mercapto-2-methylpropionyl]-L-proline, e.g., Captopril, Mylan, CAS RN 62571-86-2 and others disclosed in U.S. Pat. No. 4,046,889), ceranapril (and others disclosed in U.S. Pat. No. 4,452,790), cetapril (alacepril, Dainippon disclosed in Eur. Therap. Res. 39:671 (1986); 40:543 (1986)), cilazapril (Hoffman-LaRoche) disclosed in J. Cardiovasc. Pharmacol. 9:39 (1987), indalapril (delapril hydrochloride (2H-1,2,4-Benzothiadiazine-7-sulfonamide, 3-bicyclo[2.2.1]hept-5-en-2-yl-6-chloro-3,4-dihydro-, 1,1-dioxide CAS RN 2259-96-3); disclosed in U.S. Pat. No. 4,385,051), enalapril (and others disclosed in U.S. Pat. No. 4,374,829), enalopril, enaloprilat, fosinopril, ((such as L-proline, 4-cyclohexyl-1-[[[2-methyl-1-(1-oxopropoxy)propoxy](4-phenylbutyl)phosphinyl]acetyl]-, sodium salt, trans-, e.g., Monopril, Bristol-Myers Squibb and others disclosed in U.S. Pat. No. 4,168,267), fosinopril sodium (L-Proline, 4-cyclohexyl-1-[[(R)-[(1S)-2-methyl-1-(1-ox-opropoxy)propox), imidapril, indolapril (Schering, disclosed in J. Cardiovasc. Pharmacol. 5:643, 655 (1983)), lisinopril (Merck), losinopril, moexipril, moexipril hydrochloride (3-Isoquinolinecarboxylic acid, 2-[(2S)-2-[[(1S)-1-(ethoxycarbonyl)-3-phenylpropyl]amino]-1-oxopropyl]-1,-2,3,4-tetrahydro-6,7-dimethoxy-, monohydrochloride, (3S)-CAS RN 82586-52-5), quinapril, quinaprilat, ramipril (Hoechsst) disclosed in EP 79022 and Curr. Ther. Res. 40:74 (1986), perindopril erbumine (such as 2S,3aS,7aS-1-[(S)—N—[(S)-1-Carboxybutyl]alanyl]hexahydro-2-indolinecarboxylic acid, 1-ethyl ester, compound with tert-butylamine (1:1), e.g., Aceon®, Solvay), perindopril (Servier, disclosed in Eur. J. clin. Pharmacol. 31:519 (1987)), quanipril (disclosed in U.S. Pat. No. 4,344,949), spirapril (Schering, disclosed in Acta. Pharmacol. Toxicol. 59 (Supp. 5):173 (1986)), tenocapril, trandolapril, zofenopril (and others disclosed in U.S. Pat. No. 4,316,906), rentiapril (fentiapril, disclosed in Clin. Exp. Pharmacol. Physiol. 10:131 (1983)), pivopril, YS980, teprotide (Bradykinin potentiator BPP9a CAS RN 35115-60-7), BRL 36,378 (Smith Kline Beecham, see EP80822 and EP60668), MC-838 (Chugai, see C.A. 102:72588v and Jap. J. Pharmacol. 40:373 (1986), CGS 14824 (Ciba-Geigy, 3-([1-ethoxycarbonyl-3-phenyl-(1S)-propyl]amino)-2,3,4,5-tetrahydro-2ox-o-1-(3S)-benzazepine-1 acetic acid HCl, see U.K. Patent No. 2103614), CGS16,617 (Ciba-Geigy, 3(S)-[[(1S)-5-amino-1-carboxypentyl]amino]-2,3,4,-5-tetrahydro-2-oxo-1H-1-benzazepine-1-ethanoic acid, see U.S. Pat. No. 4,473,575), Ru 44570 (Hoechst, see Arzneimittelforschung 34:1254 (1985)), R 31-2201 (Hoffman-LaRoche see FEBS Lett. 165:201 (1984)), C1925 (Pharmacologist 26:243, 266 (1984)), WY-44221 (Wyeth, see J. Med. Chem. 26:394 (1983)), and those disclosed in US2003006922 (paragraph 28), U.S. Pat. No. 4,337,201, U.S. Pat. No. 4,432,971 (phosphonamidates); neutral endopeptidase inhibitors such as omapatrilat (Vanlev®), CGS 30440, cadoxatril and ecadotril, fasidotril (also known as aladotril or alatriopril), sampatrilat, mixanpril, and gemopatrilat, AVE7688, ER4030, and those disclosed in U.S. Pat. No. 5,362,727, U.S. Pat. No. 5,366,973, U.S. Pat. No. 5,225,401, U.S. Pat. No. 4,722,810, U.S. Pat. No. 5,223,516, U.S. Pat. No. 4,749,688, U.S. Pat. No. 5,552,397, U.S. Pat. No. 5,504,080, U.S. Pat. No. 5,612,359, U.S. Pat. No. 5,525,723, EP0599444, EP0481522, EP0599444, EP0595610, EP0534363, EP534396, EP534492, EP0629627;
endothelin antagonists such as tezosentan, A308165, and YM62899, and the like;
vasodilators such as hydralazine (apresoline), clonidine (clonidine hydrochloride (1H-Imidazol-2-amine, N-(2,6-dichlorophenyl)4,5-dihydro-, monohydrochloride CAS RN 4205-91-8), catapres, minoxidil (loniten), nicotinyl alcohol (roniacol), diltiazem hydrochloride (such as 1,5-Benzothiazepin-4(5H)-one,3-(acetyloxy)-5 [2-(dimethylamino)ethyl]-2,-3-dihydro-2(4-methoxyphenyl)-, monohydrochloride, (+)-cis, e.g., Tiazac®, Forest), isosorbide dinitrate (such as 1,4:3,6-dianhydro-D-glucitol 2,5-dinitrate e.g., Isordil® Titradose®, Wyeth-Ayerst), sosorbide mononitrate (such as 1,4:3,6-dianhydro-D-glucito-1,5-nitrate, an organic nitrate, e.g., Ismo®, Wyeth-Ayerst), nitroglycerin (such as 2,3 propanetriol trinitrate, e.g., Nitrostat® Parke-Davis), verapamil hydrochloride (such as benzeneacetonitrile, (±)-(alpha)[3-[[2-(3,4 dimethoxyphenyl)ethyl]methylamino]propyl]-3,4-dimethoxy-(alpha)-(1-methylethyl)hydrochloride, e.g., Covera HS® Extended-Release, Searle), chromonar (which may be prepared as disclosed in U.S. Pat. No. 3,282,938), clonitate (Annalen 1870 155), droprenilamine (which may be prepared as disclosed in DE2521113), lidoflazine (which may be prepared as disclosed in U.S. Pat. No. 3,267,104); prenylamine (which may be prepared as disclosed in U.S. Pat. No. 3,152,173), propatyl nitrate (which may be prepared as disclosed in French Patent No. 1,103,113), mioflazine hydrochloride (1-piperazineacetamide, 3-(aminocarbonyl)-4-[4,4-bis(4-fluorophenyl)butyl]-N-(2,6-dichlorophenyl)-, dihydrochloride CAS RN 83898-67-3), mixidine (Benzeneethanamine, 3,4-dimethoxy-N-(1-methyl-2-pyrrolidinylidene)-Pyrrolidine, 2-[(3,4-dimethoxyphenethyl)imino]-1-methyl-1-Methyl-2-[(3,4-dimethoxyphenethyl)imino]pyrrolidine CAS RN 27737-38-8), molsidomine (1,2,3-Oxadiazolium, 5-[(ethoxycarbonyl)amino]-3-(4-morpholinyl)-, inner salt CAS RN 25717-80-0), isosorbide mononitrate (D-Glucitol, 1,4:3,6-dianhydro-, 5-nitrate CAS RN 16051-77-7), erythrityl tetranitrate (1,2,3,4-Butanetetrol, tetranitrate, (2R,3S)-rel-CAS RN 7297-25-8), clonitrate(1,2-Propanediol, 3-chloro-, dinitrate (7CI, 8CI, 9CI) CAS RN 2612-33-1), dipyridamole Ethanol, 2,2′,2″,2′″-[(4,8-di-1-piperidinylpyrimido[5,4-d]pyrimidine-2,6-diyl)dinitrilo]tetrakis-CAS RN 58-32-2), nicorandil (CAS RN 65141-46-0 3-), pyridinecarboxamide (N-[2-(nitrooxy)ethyl]-Nisoldipine-3,5-Pyridinedicarboxylic acid, 1,4-dihydro-2,6-dimethyl-4-(2-nitrophenyl)-, methyl 2-methylpropyl ester CAS RN 63675-72-9), nifedipine-3,5-Pyridinedicarboxylic acid, 1,4-dihydro-2,6-dimethyl-4-(2-nitrophenyl)-, dimethyl ester CAS RN 21829-25-4), perhexyline maleate (Piperidine, 2-(2,2-dicyclohexylethyl)-, (2Z)-2-butenedioate (1:1) CAS RN 6724-53-4), oxprenolol hydrochloride (2-Propanol, 1-[(1-methylethyl)amino]-3-[2-(2-propenyloxy)phenoxy]-, hydrochloride CAS RN 6452-73-9), pentrinitrol (1,3-Propanediol, 2,2-bis[(nitrooxy)methyl]-, mononitrate (ester) CAS RN 1607-17-6), verapamil (Benzeneacetonitrile, α-[3-[[2-(3,4-dimethoxyphenyl)ethyl]-methylamino]propyl]-3,4-dimethoxy-α-(1-methylethyl)-CAS RN 52-53-9) and the like; angiotensin II receptor antagonists such as, aprosartan, zolasartan, olmesartan, pratosartan, F16828K, RNH6270, candesartan (1H-Benzimidazole-7-carboxylic acid, 2-ethoxy-1-[[2′-(1H-tetrazol-5-yl)[1,1′-biphenyl]4-yl]methyl]-CAS RN 139481-59-7), candesartan cilexetil ((+/−)-1-(cyclohexylcarbonyloxy)ethyl-2-ethoxy-1-[[2′-(1H-tetrazol-5-yl)biphenyl-4-yl]-1H-benzimidazole carboxylate, CAS RN 145040-37-5, U.S. Pat. No. 5,703,110 and U.S. Pat. No. 5,196,444), eprosartan (3-[1-4-carboxyphenylmethyl)-2-n-butyl-imidazol-5-yl]-(2-thienylmethyl)propenoic acid, U.S. Pat. No. 5,185,351 and U.S. Pat. No. 5,650,650), irbesartan (2-n-butyl-3-[[2′-(1 h-tetrazol-5-yl)biphenyl-4-yl]methyl] 1,3-diazazspiro[4,4]non-1-en-4-one, U.S. Pat. No. 5,270,317 and U.S. Pat. No. 5,352,788), losartan (2-N-butyl-4-chloro-5-hydroxymethyl-1-[(2′-(1H-tetrazol-5-yl)biphenyl-4-yl)-methyl]imidazole, potassium salt, U.S. Pat. No. 5,138,069, U.S. Pat. No. 5,153,197 and U.S. Pat. No. 5,128,355), tasosartan (5,8-dihydro-2,4-dimethyl-8-[(2′-(1H-tetrazol-5-yl) [1,1′-biphenyl]4-yl)methyl]-pyrido[2,3-d]pyrimidin-7(6H)-one, U.S. Pat. No. 5,149,699), telmisartan (4′-[(1,4-dimethyl-2′-propyl-(2,6′-bi-1H-benzimidazol)-1′-yl)]-[1,1′-biphenyl]-2-carboxylic acid, CAS RN 144701-48-4, U.S. Pat. No. 5,591,762), milfasartan, abitesartan, valsartan (Diovan® (Novartis), (S)—N-valeryl-N-[[2′-(1H-tetrazol-5-yl)biphenyl-4-yl)methyl]valine, U.S. Pat. No. 5,399,578), EXP-3137 (2-N-butyl-4-chloro-1-[(2′-(1H-tetrazol-5-yl)biphenyl-4-yl)-methyl]imidazole-5-carboxylic acid, U.S. Pat. No. 5,138,069, U.S. Pat. No. 5,153,197 and U.S. Pat. No. 5,128,355), 3-(2′-(tetrazol-5-yl)-1,1′-biphen-4-yl)methyl-5,7-dimethyl-2-ethyl-3H-imidazo[4,5-b]pyridine, 4′[2-ethyl-4-methyl-6-(5,6,7,8-tetrahydroimidazo[1,2-a]pyridin-2-yl]-benzimidazol-1-yl}-methyl]-1,1′-biphenyl]-2-carboxylic acid, 2-butyl-6-(1-methoxy-1-methylethyl)-2-[2′-)IH-tetrazol-5-yl)biphenyl-4-ylmethyl]quinazolin-4(3H)-one, 3-[2′-carboxybiphenyl-4-yl)methyl]-2-cyclopropyl-7-methyl-3H-imidazo[4,5-b]pyridine, 2-butyl-4-chloro-1-[(2′-tetrazol-5-yl)biphenyl-4-yl)methyl]imidazole-carboxylic acid, 2-butyl-4-chloro-1-[[2′-(1H-tetrazol-5-yl) [1,1′-biphenyl]-4-yl]methyl]-1H-imidazole-5-carboxylic acid-1-(ethoxycarbonyl-oxy)ethyl ester potassium salt, dipotassium 2-butyl-4-(methylthio)-1-[[2-[[[(propylamino)carbonyl]amino]-sulfonyl](1,1′-biphenyl)-4-yl]methyl]-1H-imidazole-5-carboxylate, methyl-2-[[4-butyl-2-methyl-6-oxo-5-[[2′-(1H-tetrazol-5-yl)-[1,1′-biphenyl]-4-yl]methyl]-1-(6H)-pyrimidinyl]methyl]-3-thiophencarboxylate, 5-[(3,5-dibutyl-1H-1,2,4-triazol-1-yl)methyl]-2-[2-(1H-tetrazol-5-ylphenyl)]pyridine, 6-butyl-2-(2-phenylethyl)-5[[2′-(1H-tetrazol-5-yl) [1,1′-biphenyl]-4-methyl]pyrimidin-4-(3H)-one D,L lysine salt, 5-methyl-7-n-propyl-8-[[2′-(1H-tetrazol-5-yl)biphenyl-4-yl]methyl]-[1,2,4]-triazolo[1,5-c]pyrimidin-2(3H)-one, 2,7-diethyl-5-[[2′-(5-tetrazoly)biphenyl-4-yl]methyl]-5H-pyrazolo[1,5-b][1,2,4]triazole potassium salt, 2-[2-butyl-4,5-dihydro-4-oxo-3-[2′-(1H-tetrazol-5-yl)-4-biphenylmethyl]-3H-imidazol[4,5-c]pyridine-5-ylmethyl]benzoic acid, ethyl ester, potassium salt, 3-methoxy-2,6-dimethyl-4-[[2′ (1H-tetrazol-5-yl)-1,1′-biphenyl-4-yl]methoxy]pyridine, 2-ethoxy-1-[[2′-(5-oxo-2,5-dihydro-1,2,4-oxadiazol-3-yl)biphenyl-4-yl]methyl]-1H-benzimidazole-7-carboxylic acid, 1-[N-(2′-(1H-tetrazol-5-yl)biphenyl-4-yl-methyl)-N-valerolylaminomethyl)cyclopentane-1-carboxylic acid, 7-methyl-2n-propyl-3-[[2′ 1H-tetrazol-5-yl)biphenyl-4-yl]methyl]-3H-imidazo[4, 5-6]pyridine, 2-[5-[(2-ethyl-5,7-dimethyl-3H-imidazo[4,5-b]pyridine-3-yl)methyl]-2-quinolinylisodium benzoate, 2-butyl-6-chloro-4-hydroxymethyl-5-methyl-3-[[2′-(1H-tetrazol-5-yl)biphenyl-4-yl]methyl]pyridine, 2-[[[2-butyl-1-[(4-carboxyphenyl)methyl]-1H-imidazol-5-yl]methyl]amino]benzoic acid tetrazol-5-yl)biphenyl-4-yl]methyl]pyrimidin-6-one, 4(S)-[4-(carboxymethyl)phenoxy]-N-[2(R)-[4-(2-sulfobenzamido)imidazol-1-yl]octanoyl]-L-proline, 1-(2,6-dimethylphenyl)-4-butyl-1,3-dihydro-3-[[6-[2-(1H-tetrazol-5-yl)phenyl]-3-pyridinyl]methyl]-2H-imidazol-2-one, 5,8-ethano-5,8-dimethyl-2-n-propyl-5,6,7,8-tetrahydro-1-[[2′(1H-tetrazol-5-yl)biphenyl-4-yl]methyl]-1H,4H-1,3,4a,8a-tetrazacyclopentanaphthalene-9-one, 4-[1-[2′-(1,2,3,4-tetrazol-5-yl)biphen-4-yl)methylamino]-5,6,7,8-tetrahydro-2-trifylquinazoline, 2-(2-chlorobenzoyl)imino-5-ethyl-3-[2′-(1H-tetrazole-5-yl)biphenyl-4-yl)methyl-1,3,4-thiadiazoline, 2-[5-ethyl-3-[2-(1H-tetrazole-5-5 yl)biphenyl-4-yl]methyl-1,3,4-thiazoline-2-ylidene]aminocarbonyl-1-cyclopentencarboxylic acid dipotassium salt, and 2-butyl-4-[N-methyl-N-(3-methylcrotonoyl)amino]-1-[[2′-(1H-tetrazol-5-yl)biphenyl-4-yl]methyl]-1H-imidzole-5-carboxylic acid 1-ethoxycarbonyloxyethyl ester, those disclosed in patent publications EP475206, EP497150, EP539086, EP539713, EP535463, EP535465, EP542059, EP497121, EP535420, EP407342, EP415886, EP424317, EP435827, EP433983, EP475898, EP490820, EP528762, EP324377, EP323841, EP420237, EP500297, EP426021, EP480204, EP429257, EP430709, EP434249, EP446062, EP505954, EP524217, EP514197, EP514198, EP514193, EP514192, EP450566, EP468372, EP485929, EP503162, EP533058, EP467207 EP399731, EP399732, EP412848, EP453210, EP456-442, EP470794, EP470795, EP495626, EP495627, EP499-414, EP499-416, EP499-415, EP511791, EP516392, EP520723, EP520724, EP539066, EP438869, EP505893, EP530702, EP400835, EP400974, EP401030, EP407102, EP411766, EP409332, EP412594, EP419048, EP480659, EP481614, EP490587, EP467715, EP479-479, EP502725, EP503838, EP505098, EP505111 EP513,979 EP507594, EP510812, EP511767, EP512675, EP512676, EP512870, EP517357, EP537937, EP534706, EP527534, EP540356, EP461040, EP540039, EP465368, EP498723, EP498722, EP498721, EP515265, EP503785, EP501892, EP519831, EP532410, EP498361, EP432737, EP504888, EP508393, EP508445, EP403159, EP403158, EP425211, EP427463, EP437103, EP481448, EP488532, EP501269, EP500409, EP540400, EP005528, EP028834, EP028833, EP411507, EP425921, EP430300, EP434038, EP442-473, EP443568, EP445811, EP459136, EP483683, EP518033, EP520423, EP531876, EP531874, EP392317, EP468470, EP470543, EP502314, EP529253, EP543263, EP540209, EP449699, EP465323, EP521768, EP415594, WO92/14468, WO93/08171, WO93/08169, WO91/00277, WO91/00281, WO91/14367, WO92/00067, WO92/00977, WO92/20342, WO93/04045, WO93/04046, WO91/15206, WO92/14714, WO92/09600, WO92/16552, WO93/05025, WO93/03018, WO91/07404, WO92/02508, WO92/13853, WO91/19697, WO91/11909, WO91/12001, WO91/11999, WO91/15209, WO91/15479, WO92/20687, WO92/20662, WO92/20661, WO93/01177, WO91/14679, WO91/13063, WO92/13564, WO91/17148, WO91/18888, WO91/19715, WO92/02257, WO92/04335, WO92/05161, WO92/07852, WO92/15577, WO93/03033, WO91/16313, WO92/00068, WO92/02510, WO92/09278, WO9210179, WO92/10180, WO92/10186, WO92/10181, WO92/10097, WO92/10183, WO92/10182, WO92/10187, WO92/10184, WO92/10188, WO92/10180, WO92/10185, WO92/20651, WO93/03722, WO93/06828, WO93/03040, WO92/19211, WO92/22533, WO92/06081, WO92/05784, WO93/00341, WO92/04343, WO92/04059, U.S. Pat. No. 5,104,877, U.S. Pat. No. 5,187,168, U.S. Pat. No. 5,149,699, U.S. Pat. No. 5,185,340, U.S. Pat. No. 4,880,804, U.S. Pat. No. 5,138,069, U.S. Pat. No. 4,916,129, U.S. Pat. No. 5,153,197, U.S. Pat. No. 5,173,494, U.S. Pat. No. 5,137,906, U.S. Pat. No. 5,155,126, U.S. Pat. No. 5,140,037, U.S. Pat. No. 5,137,902, U.S. Pat. No. 5,157,026, U.S. Pat. No. 5,053,329, U.S. Pat. No. 5,132,216, U.S. Pat. No. 5,057,522, U.S. Pat. No. 5,066,586, U.S. Pat. No. 5,089,626, U.S. Pat. No. 5,049,565, U.S. Pat. No. 5,087,702, U.S. Pat. No. 5,124,335, U.S. Pat. No. 5,102,880, U.S. Pat. No. 5,128,327, U.S. Pat. No. 5,151,435, U.S. Pat. No. 5,202,322, U.S. Pat. No. 5,187,159, U.S. Pat. No. 5,198,438, U.S. Pat. No. 5,182,288, U.S. Pat. No. 5,036,048, U.S. Pat. No. 5,140,036, U.S. Pat. No. 5,087,634, U.S. Pat. No. 5,196,537, U.S. Pat. No. 5,153,347, U.S. Pat. No. 5,191,086, U.S. Pat. No. 5,190,942, U.S. Pat. No. 5,177,097, U.S. Pat. No. 5,212,177, U.S. Pat. No. 5,208,234, U.S. Pat. No. 5,208,235, U.S. Pat. No. 5,212,195, U.S. Pat. No. 5,130,439, U.S. Pat. No. 5,045,540, U.S. Pat. No. 5,041,152, and U.S. Pat. No. 5,210,204, and pharmaceutically acceptable salts and esters thereof, U/3 adrenergic blockers such as nipradilol, arotinolol, amosulalol, bretylium tosylate (CAS RN: 61-75-6), dihydroergtamine mesylate (such as ergotaman-3′,6′,18-trione,9,-10-dihydro-12′-hydroxy-2′-methyl-5′-(phenylmethyl)-,(5′(α))-, monomethanesulfonate, e.g., DHE 45® Injection, Novartis), carvedilol (such as (±)-1-(Carbazol-4-yloxy)-3-[[2-(o-methoxyphenoxy)ethyl]amino]-2-propanol, e.g., Coreg®, SmithKline Beecham), labetalol (such as 5-[1-hydroxy-2-[(1-methyl-3-phenylpropyl)amino]ethyl]salicylamide monohydrochloride, e.g., Normodyne®, Schering), bretylium tosylate (Benzenemethanaminium, 2-bromo-N-ethyl-N,N-dimethyl-, salt with 4-methylbenzenesulfonic acid (1:1) CAS RN 61-75-6), phentolamine mesylate (Phenol, 3-[[(4,5-dihydro-1H-imidazol-2-yl)methyl](4-methylphenyl)amino]-, monomethanesulfonate (salt) CAS RN 65-28-1), solypertine tartrate (5H-1,3-Dioxolo[4,5-f]indole, 7-[2-[4-(2-methoxyphenyl)-1-piperazinyl]ethyl]-, (2R,3R)-2,3-dihydroxybutanedioate (1:1) CAS RN 5591-43-5), zolertine hydrochloride (piperazine, 1-phenyl-4-[2-(1H-tetrazol-5-yl)ethyl]-, monohydrochloride (8Cl, 9Cl) CAS RN 7241-94-3) and the like; a adrenergic receptor blockers, such as alfuzosin (CAS RN: 81403-68-1), terazosin, urapidil, prazosin (Minipress®), tamsulosin, bunazosin, trimazosin, doxazosin, naftopidil, indoramin, WHP 164, XEN010, fenspiride hydrochloride (which may be prepared as disclosed in U.S. Pat. No. 3,399,192), proroxan (CAS RN 33743-96-3), and labetalol hydrochloride and combinations thereof; α2 agonists such as methyldopa, methyldopa HCL, lofexidine, tiamenidine, moxonidine, rilmenidine, guanobenz, and the like;
aldosterone inhibitors, and the like; renin inhibitors including Aliskiren (SPP100; Novartis/Speede1); angiopoietin-2-binding agents such as those disclosed in WO03/030833;
anti-angina agents such as ranolazine (hydrochloride1-Piperazineacetamide, N-(2,6-dimethylphenyl)-4-[2-hydroxy-3-(2-methoxyphenoxy)propyl]-, dihydrochloride CAS RN 95635-56-6), betaxolol hydrochloride (2-Propanol, 1-[4-[2 (cyclopropylmethoxy)ethyl]phenoxy]-3-[(1-methylethyl)amino]-, hydrochloride CAS RN 63659-19-8), butoprozine hydrochloride (Methanone, [4-[3(dibutylamino)propoxy]phenyl](2-ethyl-3-indolizinyl)-, monohydrochloride CAS RN 62134-34-3), cinepazet maleate1-piperazineacetic acid, 4-[1-oxo-3-(3,4,5-trimethoxyphenyl)-2-propenyl]-, ethyl ester, (2Z)-2-butenedioate (1:1) CAS RN 50679-07-7), tosifen (Benzenesulfonamide, 4-methyl-N-[[[(1S)-1-methyl-2-phenylethyl]amino]carbonyl]-CAS RN 32295-184), verapamilhydrochloride (Benzeneacetonitrile, α-[3-[[2-(3,4-dimethoxyphenyl)ethyl]methylamino]propyl]-3,4-dimethoxy-α-(1-methylethyl)-, monohydrochloride CAS RN 152-114), molsidomine (1,2,3-Oxadiazolium, 5-[(ethoxycarbonyl)amino]-3-(4-morpholinyl)-, inner salt CAS RN 25717-80-0), and ranolazine hydrochloride (1-piperazineacetamide, N-(2,6-dimethylphenyl)-4-[2-hydroxy-3-(2-meth-oxyphenoxy)propyl]-, dihydrochloride CAS RN 95635-56-6); tosifen (Benzenesulfonamide, 4-methyl-N-[[[(1S)-1-methyl-2-phenylethyl]amino]carbonyl]-CAS RN 32295-184); adrenergic stimulants such as guanfacine hydrochloride (such as N-amidino-2-(2,6-dichlorophenyl)acetamide hydrochloride, e.g., Tenex® Tablets available from Robins); methyldopa-hydrochlorothiazide (such as levo-3-(3,4-dihydroxyphenyl)-2-methylalanine) combined with Hydrochlorothiazide (such as 6-chloro-3,4-dihydro-2H-1,2,4-benzothiadiazine-7-sulfonamide 1,1-dioxide, e.g., the combination as, e.g., Aldoril® Tablets available from Merck), methyldopa-chlorothiazide (such as 6-chloro-2H-1,2,4-benzothiadiazine-7-sulfonamide 1,1-dioxide and methyldopa as described above, e.g., Aldoclor®, Merck), clonidine hydrochloride (such as 2-(2,6-dichlorophenylamino)-2-imidazoline hydrochloride and chlorthalidone (such as 2-chloro-5-(1-hydroxy-3-oxo-1-isoindolinyl)benzenesulfonamide), e.g., Combipres®, Boehringer Ingelheim), clonidine hydrochloride (such as 2-(2,6-dichlorophenylamino)-2-imidazoline hydrochloride, e.g., Catapres®, Boehringer Ingelheim), clonidine (1H-Imidazol-2-amine, N-(2,6-dichlorophenyl)4,5-dihydro-CAS RN 4205-90-7), Hyzaar (Merck; a combination of losartan and hydrochlorothiazide), Co-Diovan (Novartis; a combination of valsartan and hydrochlorothiazide, Lotrel (Novartis; a combination of benazepril and amlodipine) and Caduet (Pfizer; a combination of amlodipine and atorvastatin), and those agents disclosed in US20030069221.

[0545] The peptides and agonists described herein can be used in combination therapy with one or more of the following agents useful in the treatment of respiratory and other disorders including but not limited to:

[0546] (1) β-agonists including but not limited to: albuterol (PROVENTIL®, SALBUTAMO1®, VENTOLIN®), bambuterol, bitoterol, clenbuterol, fenoterol, formoterol, isoetharine (BRONKOSOL®, BRONKOMETER®), metaproterenol (ALUPENT®, METAPREL®), pirbuterol (MAXAIR®), reproterol, rimiterol, salmeterol, terbutaline (BRETHAIRE®, BRETHINE®, BRICANYL®), adrenalin, isoproterenol (ISUPREL®), epinephrine bitartrate (PRIMATENE®), ephedrine, orciprenline, fenoterol and isoetharine;

[0547] (2) steroids, including but not limited to beclomethasone, beclomethasone dipropionate, betamethasone, budesonide, bunedoside, butixocort, dexamethasone, flunisolide, fluocortin, fluticasone, hydrocortisone, methyl prednisone, mometasone, predonisolone, predonisone, tipredane, tixocortal, triamcinolone, and triamcinolone acetonide;

[0548] (3) β2-agonist-corticosteroid combinations [e.g., salmeterol-fluticasone (ADVAIR®), formoterol-budesonid (SYMBICORT®)];

[0549] (4) leukotriene D4 receptor antagonists/leukotriene antagonists/LTD4 antagonists (i.e., any compound that is capable of blocking, inhibiting, reducing or otherwise interrupting the interaction between leukotrienes and the Cys LTI receptor) including but not limited to: zafirlukast, montelukast, montelukast sodium (SINGULAIR®), pranlukast, iralukast, pobilukast, SKB-106,203 and compounds described as having LTD4 antagonizing activity described in U.S. Pat. No. 5,565,473;

[0550] (5) 5-lipoxygenase inhibitors and/or leukotriene biosynthesis inhibitors [e.g., zileuton and BAY1005 (CA registry 128253-31-6)];

[0551] (6) histamine H1 receptor antagonists/antihistamines (i.e., any compound that is capable of blocking, inhibiting, reducing or otherwise interrupting the interaction between histamine and its receptor) including but not limited to: astemizole, acrivastine, antazoline, azatadine, azelastine, astamizole, bromopheniramine, bromopheniramine maleate, carbinoxamine, carebastine, cetirizine, chlorpheniramine, chloropheniramine maleate, cimetidine, clemastine, cyclizine, cyproheptadine, descarboethoxyloratadine, dexchlorpheniramine, dimethindene, diphenhydramine, diphenylpyraline, doxylamine succinate, doxylamine, ebastine, efletirizine, epinastine, farnotidine, fexofenadine, hydroxyzine, hydroxyzine, ketotifen, levocabastine, levocetirizine, levocetirizine, loratadine, meclizine, mepyramine, mequitazine, methdilazine, mianserin, mizolastine, noberastine, norasternizole, noraztemizole, phenindamine, pheniramine, picumast, promethazine, pynlamine, pyrilamine, ranitidine, temelastine, terfenadine, trimeprazine, tripelenamine, and triprolidine;

[0552] (7) an anticholinergic including but not limited to: atropine, benztropine, biperiden, flutropium, hyoscyamine (e.g. Levsin®; Levbid®; Levsin/SL®, Anaspaz®, Levsinex Timecaps®, NuLev®), ilutropium, ipratropium, ipratropium bromide, methscopolamine, oxybutinin, rispenzepine, scopolamine, and tiotropium;

[0553] (8) an anti-tussive including but not limited to: dextromethorphan, codeine, and hydromorphone;
[0554] (9) a decongestant including but not limited to: pseudoephedrine and phenylpropanolamine;

[0555] (10) an expectorant including but not limited to: guafenesin, guaicolsulfate, terpin, ammonium chloride, glycerol guaicolate, and iodinated glycerol;

[0556] (11) a bronchodilator including but not limited to: theophylline and aminophylline;

[0557] (12) an anti-inflammatory including but not limited to: fluribiprofen, diclophenac, indomethacin, ketoprofen, S-ketroprophen, tenoxicam;

[0558] (13) a PDE (phosphodiesterase) inhibitor including but not limited to those disclosed herein;

[0559] (14) a recombinant humanized monoclonal antibody [e.g. xolair (also called omalizumab), rhuMab, and talizumab];

[0560] (15) a humanized lung surfactant including recombinant forms of surfactant proteins SP-B, SP-C or SP-D [e.g. SURFAXIN®, formerly known as dsc-104 (Discovery Laboratories)],

[0561] (16) agents that inhibit epithelial sodium channels (ENaC) such as amiloride and related compounds;

[0562] (17) antimicrobial agents used to treat pulmonary infections such as acyclovir, amikacin, amoxicillin, doxycycline, trimethoprin sulfamethoxazole, amphotericin B, azithromycin, clarithromycin, roxithromycin, clarithromycin, cephalosporins (ceffoxitin, cefmetazole etc), ciprofloxacin, ethambutol, gentimycin, ganciclovir, imipenem, isoniazid, itraconazole, penicillin, ribavirin, rifampin, rifabutin, amantadine, rimantidine, streptomycin, tobramycin, and vancomycin;

[0563] (18) agents that activate chloride secretion through Ca++ dependent chloride channels (such as purinergic receptor (P2Y(2) agonists);

[0564] (19) agents that decrease sputum viscosity, such as human recombinant DNase 1, (Pulmozyme®);

[0565] (20) nonsteroidal anti-inflammatory agents (acemetacin, acetaminophen, acetyl salicylic acid, alclofenac, alminoprofen, apazone, aspirin, benoxaprofen, bezpiperylon, bucloxic acid, carprofen, clidanac, diclofenac, diclofenac, diflunisal, diflusinal, etodolac, fenbufen, fenbufen, fenclofenac, fenclozic acid, fenoprofen, fentiazac, feprazone, flufenamic acid, flufenisal, flufenisal, fluprofen, flurbiprofen, flurbiprofen, furofenac, ibufenac, ibuprofen, indomethacin, indomethacin, indoprofen, isoxepac, isoxicam, ketoprofen, ketoprofen, ketorolac, meclofenamic acid, meclofenamic acid, mefenamic acid, mefenamic acid, miroprofen, mofebutazone, nabumetone oxaprozin, naproxen, naproxen, niflumic acid, oxaprozin, oxpinac, oxyphenbutazone, phenacetin, phenylbutazone, phenylbutazone, piroxicam, piroxicam, pirprofen, pranoprofen, sudoxicam, tenoxican, sulfasalazine, sulindac, sulindac, suprofen, tiaprofenic acid, tiopinac, tioxaprofen, tolfenamic acid, tolmetin, tolmetin, zidometacin, zomepirac, and zomepirac); and

[0566] (21) aerosolized antioxidant therapeutics such as S-Nitrosoglutathione.

[0567] The peptides and agonists described herein can be used in combination therapy with an anti-obesity agent. Suitable such agents include, but are not limited to:

11β HSD-1 (11-beta hydroxy steroid dehydrogenase type 1) inhibitors, such as BVT 3498, BVT 2733, 3-(1-adamantyl)-4-ethyl-5-(ethylthio)-4H-1,2,4-triazole, 3-(1-adamantyl)-5-(3,4,5-trimethoxyphenyl)-4-methyl-4H-1,2,4-triazole, 3-adamantanyl-4,5,6,7,8,9,10,11,12,3a-decahydro-1,2,4-triazolo[4,3-a][11]annulene, and those compounds disclosed in WO01/90091, WO01/90090, WO01/90092 and WO02/072084;
5HT antagonists such as those in WO03/037871, WO03/037887, and the like;
5HT1a modulators such as carbidopa, benserazide and those disclosed in U.S. Pat. No. 6,207,699, WO03/031439, and the like;
5HT2c (serotonin receptor 2c) agonists, such as BVT933, DPCA37215, IK264, PNU 22394, WAY161503, R-1065, SB 243213 (Glaxo Smith Kline) and YM 348 and those disclosed in U.S. Pat. No. 3,914,250, WO00/77010, WO02/36596, WO02/48124, WO02/10169, WO01/66548, WO02/44152, WO02/51844, WO02/40456, and WO02/40457;
5HT6 receptor modulators, such as those in WO03/030901, WO03/035061, WO03/039547, and the like;
acyl-estrogens, such as oleoyl-estrone, disclosed in del Mar-Grasa, M. et al., Obesity Research, 9:202-9 (2001) and Japanese Patent Application No. JP 2000256190;
anorectic bicyclic compounds such as 1426 (Aventis) and 1954 (Aventis), and the compounds disclosed in WO00/18749, WO01/32638, WO01/62746, WO01/62747, and WO03/015769;
CB 1 (cannabinoid-1 receptor) antagonist/inverse agonists such as rimonabant (Acomplia; Sanofi), SR-147778 (Sanofi), SR-141716 (Sanofi), BAY 65-2520 (Bayer), and SLV 319 (Solvay), and those disclosed in patent publications U.S. Pat. No. 4,973,587, U.S. Pat. No. 5,013,837, U.S. Pat. No. 5,081,122, U.S. Pat. No. 5,112,820, U.S. Pat. No. 5,292,736, U.S. Pat. No. 5,532,237, U.S. Pat. No. 5,624,941, U.S. Pat. No. 6,028,084, U.S. Pat. No. 6,509,367, U.S. Pat. No. 6,509,367, WO96/33159, WO97/29079, WO98/31227, WO98/33765, WO98/37061, WO98/41519, WO98/43635, WO98/43636, WO99/02499, WO00/10967, WO00/10968, WO01/09120, WO01/58869, WO01/64632, WO01/64633, WO01/64634, WO01/70700, WO01/96330, WO02/076949, WO03/006007, WO03/007887, WO03/020217, WO03/026647, WO03/026648, WO03/027069, WO03/027076, WO03/027114, WO03/037332, WO03/040107, WO03/086940, WO03/084943 and EP658546;
CCK-A (cholecystokinin-A) agonists, such as AR-R 15849, GI 181771 (GSK), JMV-180, A-71378, A-71623 and SR146131 (Sanofi), and those described in U.S. Pat. No. 5,739,106;
CNTF (Ciliary neurotrophic factors), such as GI-181771 (Glaxo-SmithKline), SR146131 (Sanofi Synthelabo), butabindide, PD170,292, and PD 149164 (Pfizer);
CNTF derivatives, such as Axokine® (Regeneron), and those disclosed in WO94/09134, WO98/22128, and WO99/43813;
dipeptidyl peptidase IV (DP-IV) inhibitors, such as isoleucine thiazolidide, valine pyrrolidide, NVP-DPP728, LAF237, P93/01, P 3298, TSL 225 (tryptophyl-1,2,3,4-tetrahydroisoquinoline-3-carboxylic acid; disclosed by Yamada et al, Bioorg. & Med. Chem. Lett. 8 (1998) 1537-1540), TMC-2A/2B/2C, CD26 inhibitors, FE 999011, P9310/K364, VIP 0177, SDZ 274-444, 2-cyanopyrrolidides and 4-cyanopyrrolidides as disclosed by Ashworth et al, Bioorg. & Med. Chem. Lett., Vol. 6, No. 22, pp 1163-1166 and 2745-2748 (1996) and the compounds disclosed patent publications. WO99/38501, WO99/46272, WO99/67279 (Probiodrug), WO99/67278 (Probiodrug), WO99/61431 (Probiodrug), WO02/083128, WO02/062764, WO03/000180, WO03/000181, WO03/000250, WO03/002530, WO03/002531, WO03/002553, WO03/002593, WO03/004498, WO03/004496, WO03/017936, WO03/024942, WO03/024965, WO03/033524, WO03/037327 and EP1258476;
growth hormone secretagogue receptor agonists/antagonists, such as NN703, hexarelin, MK-0677 (Merck), SM-130686, CP-424391 (Pfizer), LY 444,711 (Eli Lilly), L-692,429 and L-163,255, and such as those disclosed in U.S. Ser. No. 09/662,448, U.S. provisional application 60/203,335, U.S. Pat. No. 6,358,951, US2002049196, US2002/022637, WO01/56592 and WO02/32888;

[0568] H3 (histamine H3) antagonist/inverse agonists, such as thioperamide, 3-(1H-imidazol-4-yl)propyl N-(4-pentenyl)carbamate), clobenpropit, iodophenpropit, imoproxifan, GT2394 (Gliatech), and A331440, O-[3-(1H-imidazol-4-yl)propanol]carbamates (Kiec-Kononowicz, K. et al., Pharmazie, 55:349-55 (2000)), piperidine-containing histamine H3-receptor antagonists (Lazewska, D. et al., Pharmazie, 56:927-32 (2001), benzophenone derivatives and related compounds (Sasse, A. et al., Arch. Pharm. (Weinheim) 334:45-52 (2001)), substituted N-phenylcarbamates (Reidemeister, S. et al., Pharmazie, 55:83-6 (2000)), and proxifan derivatives (Sasse, A. et al., J. Med. Chem. 43:3335-43 (2000)) and histamine H3 receptor modulators such as those disclosed in WO02/15905, WO03/024928 and WO03/024929;

leptin derivatives, such as those disclosed in U.S. Pat. No. 5,552,524, U.S. Pat. No. 5,552,523, U.S. Pat. No. 5,552,522, U.S. Pat. No. 5,521,283, WO96/23513, WO96/23514, WO96/23515, WO96/23516, WO96/23517, WO96/23518, WO96/23519, and WO96/23520;
leptin, including recombinant human leptin (PEG-OB, Hoffman La Roche) and recombinant methionyl human leptin (Amgen);
lipase inhibitors, such as tetrahydrolipstatin (orlistat/Xenical®), Triton WR1339, RHC80267, lipstatin, teasaponin, diethylumbelliferyl phosphate, FL-386, WAY-121898, Bay-N-3176, valilactone, esteracin, ebelactone A, ebelactone B, and RHC 80267, and those disclosed in patent publications WO01/77094, U.S. Pat. No. 4,598,089, U.S. Pat. No. 4,452,813, U.S. Pat. No. 5,512,565, U.S. Pat. No. 5,391,571, U.S. Pat. No. 5,602,151, U.S. Pat. No. 4,405,644, U.S. Pat. No. 4,189,438, and U.S. Pat. No. 4,242,453;
lipid metabolism modulators such as maslinic acid, erythrodiol, ursolic acid uvaol, betulinic acid, betulin, and the like and compounds disclosed in WO03/011267;
Mc4r (melanocortin 4 receptor) agonists, such as CHIR86036 (Chiron), ME-10142, ME-10145, and HS-131 (Melacure), and those disclosed in PCT publication Nos. WO99/64002, WO00/74679, WO01/991752, WO01/25192, WO01/52880, WO01/74844, WO01/70708, WO01/70337, WO01/91752, WO02/059095, WO02/059107, WO02/059108, WO02/059117, WO02/06276, WO02/12166, WO02/11715, WO02/12178, WO02/15909, WO02/38544, WO02/068387, WO02/068388, WO02/067869, WO02/081430, WO03/06604, WO03/007949, WO03/009847, WO03/009850, WO03/013509, and WO03/031410;
Mc5r (melanocortin 5 receptor) modulators, such as those disclosed in WO97/19952, WO00/15826, WO00/15790, US20030092041;
melanin-concentrating hormone 1 receptor (MCHR) antagonists, such as T-226296 (Takeda), SB 568849, SNP-7941 (Synaptic), and those disclosed in patent publications WO01/21169, WO01/82925, WO01/87834, WO02/051809, WO02/06245, WO02/076929, WO02/076947, WO02/04433, WO02/51809, WO02/083134, WO02/094799, WO03/004027, WO03/13574, WO03/15769, WO03/028641, WO03/035624, WO03/033476, WO03/033480, JP13226269, and JP1437059;
mGluR5 modulators such as those disclosed in WO03/029210, WO03/047581, WO03/048137, WO03/051315, WO03/051833, WO03/053922, WO03/059904, and the like;
serotoninergic agents, such as fenfluramine (such as Pondimin® (Benzeneethanamine, N-ethyl-alpha-methyl-3-(trifluoromethyl)-, hydrochloride), Robbins), dexfenfluramine (such as Redux® (Benzeneethanamine, N-ethyl-alpha-methyl-3-(trifluoromethyl)-, hydrochloride), Interneuron) and sibutramine ((Meridia®, Knoll/Reductil™) including racemic mixtures, as optically pure isomers (+) and (−), and pharmaceutically acceptable salts, solvents, hydrates, clathrates and prodrugs thereof including sibutramine hydrochloride monohydrate salts thereof, and those compounds disclosed in U.S. Pat. No. 4,746,680, U.S. Pat. No. 4,806,570, and U.S. Pat. No. 5,436,272, US20020006964, WO01/27068, and WO01/62341;
NE (norepinephrine) transport inhibitors, such as GW 320659, despiramine, talsupram, and nomifensine;
NPY 1 antagonists, such as BIBP3226, J-115814, BIBO 3304, LY-357897, CP-671906, GI-264879A, and those disclosed in U.S. Pat. No. 6,001,836, WO96/14307, WO01/23387, WO99/51600, WO01/85690, WO01/85098, WO01/85173, and WO01/89528;
NPY5 (neuropeptide Y Y5) antagonists, such as 152,804, GW-569180A, GW-594884A, GW-587081×, GW-548118X, FR235208, FR226928, FR240662, FR252384, 1229U91, GI-264879A, CGP71683A, LY-377897, LY-366377, PD-160170, SR-120562A, SR-120819A, JCF-104, and H409/22 and those compounds disclosed in patent publications U.S. Pat. No. 6,140,354, U.S. Pat. No. 6,191,160, U.S. Pat. No. 6,218,408, U.S. Pat. No. 6,258,837, U.S. Pat. No. 6,313,298, U.S. Pat. No. 6,326,375, U.S. Pat. No. 6,329,395, U.S. Pat. No. 6,335,345, U.S. Pat. No. 6,337,332, U.S. Pat. No. 6,329,395, U.S. Pat. No. 6,340,683, EP01010691, EP-01044970, WO97/19682, WO97/20820, WO97/20821, WO97/20822, WO97/20823, WO98/27063, WO00/107409, WO00/185714, WO00/185730, WO00/64880, WO00/68197, WO00/69849, WO/0113917, WO01/09120, WO01/14376, WO01/85714, WO01/85730, WO01/07409, WO01/02379, WO01/23388, WO01/23389, WO01/44201, WO01/62737, WO01/62738, WO01/09120, WO02/20488, WO02/22592, WO02/48152, WO02/49648, WO02/051806, WO02/094789, WO03/009845, WO03/014083, WO03/022849, WO03/028726 and Norman et al., J. Med. Chem. 43:4288-4312 (2000);
opioid antagonists, such as nalmefene (REVEX R), 3-methoxynaltrexone, methylnaltrexone, naloxone, and naltrexone (e.g. PT901; Pain Therapeutics, Inc.) and those disclosed in US20050004155 and WO00/21509;
orexin antagonists, such as SB-334867-A and those disclosed in patent publications WO01/96302, WO01/68609, WO02/44172, WO02/51232, WO02/51838, WO02/089800, WO02/090355, WO03/023561, WO03/032991, and WO03/037847;
PDE inhibitors (e.g. compounds which slow the degradation of cyclic AMP (cAMP) and/or cyclic GMP (cGMP) by inhibition of the phosphodiesterases, which can lead to a relative increase in the intracellular concentration of cAMP and cGMP; possible PDE inhibitors are primarily those substances which are to be numbered among the class consisting of the PDE3 inhibitors, the class consisting of the PDE4 inhibitors and/or the class consisting of the PDE5 inhibitors, in particular those substances which can be designated as mixed types of PDE3/4 inhibitors or as mixed types of PDE3/4/5 inhibitors) such as those disclosed in patent publications DE1470341, DE2108438, DE2123328, DE2305339, DE2305575, DE2315801, DE2402908, DE2413935, DE2451417, DE2459090, DE2646469, DE2727481, DE2825048, DE2837161, DE2845220, DE2847621, DE2934747, DE3021792, DE3038166, DE3044568, EP000718, EP0008408, EP0010759, EP0059948, EP0075436, EP0096517, EP0112987, EP0116948, EP0150937, EP0158380, EP0161632, EP0161918, EP0167121, EP0199127, EP0220044, EP0247725, EP0258191, EP0272910, EP0272914, EP0294647, EP0300726, EP0335386, EP0357788, EP0389282, EP0406958, EP0426180, EP0428302, EP0435811, EP0470805, EP0482208, EP0490823, EP0506194, EP0511865, EP0527117, EP0626939, EP0664289, EP0671389, EP0685474, EP0685475, EP0685479, JP92234389, JP94329652, JP95010875, U.S. Pat. No. 4,963,561, U.S. Pat. No. 5,141,931, WO9117991, WO9200968, WO9212961, WO9307146, WO9315044, WO9315045, WO9318024, WO9319068, WO9319720, WO9319747, WO9319749, WO9319751, WO9325517, WO9402465, WO9406423, WO9412461, WO9420455, WO9422852, WO9425437, WO9427947, WO9500516, WO9501980, WO9503794, WO9504045, WO9504046, WO9505386, WO9508534, WO9509623, WO9509624, WO9509627, WO9509836, WO9514667, WO9514680, WO9514681, WO9517392, WO9517399, WO9519362, WO9522520, WO9524381, WO9527692, WO9528926, WO9535281, WO9535282, WO9600218, WO9601825, WO9602541, WO9611917, DE3142982, DE1116676, DE2162096, EP0293063, EP0463756, EP0482208, EP0579496, EP0667345 U.S. Pat. No. 6,331,543, US20050004222 (including those disclosed in formulas I-XIII and paragraphs 37-39, 85-0545 and 557-577), WO9307124, EP0163965, EP0393500, EP0510562, EP0553174, WO9501338 and WO9603399, as well as PDE5 inhibitors (such as RX-RA-69, SCH-51866, KT-734, vesnarinone, zaprinast, SKF-96231, ER-21355, BF/GP-385, NM-702 and sildenafil (Viagra™)), PDE4 inhibitors (such as etazolate, ICI63197, RP73401, imazolidinone (RO-20-1724), MEM 1414 (R1533/R1500; Pharmacia Roche), denbufylline, rolipram, oxagrelate, nitraquazone, Y-590, DH-6471, SKF-94120, motapizone, lixazinone, indolidan, olprinone, atizoram, KS-506-G, dipamfylline, BMY-43351, atizoram, arofylline, filaminast, PDB-093, UCB-29646, CDP-840, SKF-107806, piclamilast, RS-17597, RS-25344-000, SB-207499, TIBENELAST, SB-210667, SB-211572, SB-211600, SB-212066, SB-212179, GW-3600, CDP-840, mopidamol, anagrelide, ibudilast, aminone, pimobendan, cilostazol, quazinone and N-(3,5-dichloropyrid-4-yl)-3-cyclopropylmethoxy-4-difluoromethoxybenzamide, PDE3 inhibitors (such as ICI153, 100, bemorandane (RWJ 22867), MCI-154, UD-CG 212, sulmazole, ampizone, cilostamide, carbazeran, piroximone, imazodan, CI-930, siguazodan, adibendan, saterinone, SKF-95654, SDZ-MKS-492, 349-U-85, emoradan, EMD-53998, EMD-57033, NSP-306, NSP-307, revizinone, NM-702, WIN-62582 and WIN-63291, enoximone and milrinone, PDE3/4 inhibitors (such as benafentrine, trequinsin, ORG-30029, zardaverine, L-686398, SDZ-ISQ-844, ORG-20241, EMD-54622, and tolafentrine) and other PDE inhibitors (such as vinpocetin, papaverine, enprofylline, cilomilast, fenoximone, pentoxifylline, roflumilast, tadalafil (Clalis®), theophylline, and vardenafil (Levitra®);
Neuropeptide Y2 (NPY2) agonists include but are not limited to: peptide YY and fragments and variants thereof (e.g. YY3-36 (PYY3-36) (N. Engl. J. Med. 349:941, 2003; IKPEAPGE DASPEELNRY YASLRHYLNL VTRQRY (SEQ ID NO:XXX)) and PYY agonists such as those disclosed in WO02/47712, WO03/026591, WO03/057235, and WO03/027637;
serotonin reuptake inhibitors, such as, paroxetine, fluoxetine (Prozac™), fluvoxamine, sertraline, citalopram, and imipramine, and those disclosed in U.S. Pat. No. 6,162,805, U.S. Pat. No. 6,365,633, WO03/00663, WO01/27060, and WO01/162341;
thyroid hormone β agonists, such as KB-2611 (KaroBioBMS), and those disclosed in WO02/15845, WO97/21993, WO99/00353, GB98/284425, U.S. Provisional Application No. 60/183,223, and Japanese Patent Application No. JP 2000256190;
UCP-1 (uncoupling protein-1), 2, or 3 activators, such as phytanic acid, 4-[(E)-2-(5,6,7,8-tetrahydro-5,5,8,8-tetramethyl-2-napthalenyl)-1-propenyl]benzoic acid (TTNPB), retinoic acid, and those disclosed in WO99/00123;
β3 (beta adrenergic receptor 3) agonists, such as AJ9677/TAK677 (Dainippon/Takeda), L750355 (Merck), CP331648 (Pfizer), CL-316,243, SB 418790, BRL-37344, L-796568, BMS-196085, BRL-35135A, CGP12177A, BTA-243, GW 427353, Trecadrine, Zeneca D7114, N-5984 (Nisshin Kyorin), LY-377604 (Lilly), SR 59119A, and those disclosed in U.S. Pat. No. 5,541,204, U.S. Pat. No. 5,770,615, U.S. Pat. No. 5,491,134, U.S. Pat. No. 5,776,983, U.S. Pat. No. 488,064, U.S. Pat. No. 5,705,515, U.S. Pat. No. 5,451,677, WO94/18161, WO95/29159, WO97/46556, WO98/04526 and WO98/32753, WO01/74782, WO02/32897, WO03/014113, WO03/016276, WO03/016307, WO03/024948, WO03/024953 and WO03/037881;
noradrenergic agents including, but not limited to, diethylpropion (such as Tenuate® (1-propanone, 2-(diethylamino)-1-phenyl-, hydrochloride), Merrell), dextroamphetamine (also known as dextroamphetamine sulfate, dexamphetamine, dexedrine, Dexampex, Femdex, Oxydess II, Robese, Spancap #1), mazindol ((or 5-(p-chlorophenyl)-2,5-dihydro-3H-imidazo[2,1-a]isoindol-5-ol) such as Sanorex®, Novartis or Mazanor®, Wyeth Ayerst), phenylpropanolamine (or Benzenemethanol, alpha-(1-aminoethyl)-, hydrochloride), phentermine ((or Phenol, 3-[[4,5-duhydro-1H-imidazol-2-yl)ethyl](4-methylpheny-1)amino], monohydrochloride) such as Adipex-PR, Lemmon, FASTIN®, Smith-Kline Beecham and Ionamin®, Medeva), phendimetrazine ((or (2S,3S)-3,4-Dimethyl-2-phenylmorpholine L-(+)-tartrate (1:1)) such as Metra® (Forest), Plegine® (Wyeth-Ayerst), Prelu-2® (Boehringer Ingelheim), and Statobex® (Lemmon), phendamine tartrate (such as Thephorin® (2,3,4,9-Tetrahydro-2-methyl-9-phenyl-1H-indenol[2, 1-c]pyridine L-(+)-tartrate (1:1)), Hoffmann-LaRoche), methamphetamine (such as Desoxyn®, Abbot ((S)—N, (alpha)-dimethylbenzeneethanamine hydrochloride)), and phendimetrazine tartrate (such as Bontril® Slow-Release Capsules, Amarin (−3,4-Dimethyl-2-phenylmorpholine Tartrate);
fatty acid oxidation upregulator/inducers such as Famoxin® (Genset);
monamine oxidase inhibitors including but not limited to befloxatone, moclobemide, brofaromine, phenoxathine, esuprone, befol, toloxatone, pirlindol, amiflamine, sercloremine, bazinaprine, lazabemide, milacemide, caroxazone and other certain compounds as disclosed by WO01/12176; and other anti-obesity agents such as 5HT-2 agonists, ACC (acetyl-CoA carboxylase) inhibitors such as those described in WO03/072197, alpha-lipoic acid (alpha-LA), AOD9604, appetite suppressants such as those in WO03/40107, ATL-962 (Alizyme PLC), benzocaine, benzphetamine hydrochloride (Didrex), bladderwrack (focus vesiculosus), BRS3 (bombesin receptor subtype 3) agonists, bupropion, caffeine, CCK agonists, chitosan, chromium, conjugated linoleic acid, corticotropin-releasing hormone agonists, dehydroepiandrosterone, DGAT1 (diacylglycerol acyltransferase 1) inhibitors, DGAT2 (diacylglycerol acyltransferase 2) inhibitors, dicarboxylate transporter inhibitors, ephedra, exendin-4 (an inhibitor of glp-1) FAS (fatty acid synthase) inhibitors (such as Cerulenin and C75), fat resorption inhibitors (such as those in WO03/053451, and the like), fatty acid transporter inhibitors, natural water soluble fibers (such as psyllium, plantago, guar, oat, pectin), galanin antagonists, galega (Goat's Rue, French Lilac), garcinia cambogia, germander (teucrium chamaedrys), ghrelin antibodies and ghrelin antagonists (such as those disclosed in WO01/87335, and WO02/08250), peptide hormones and variants thereof which affect the islet cell secretion, such as the hormones of the secretin/gastric inhibitory peptide (GIP)/vasoactive intestinal peptide (VIP)/pituitary adenylate cyclase activating peptide (PACAP)/glucagon-like peptide II (GLP-II)/glicentin/glucagon gene family and/or those of the adrenomedullin/amylin/calcitonin gene related peptide (CGRP) gene family including GLP-1 (glucagon-like peptide 1) agonists (e.g. (1) exendin-4, (2) those GLP-1 molecules described in US20050130891 including GLP-1(7-34), GLP-1(7-35), GLP-1(7-36) or GLP-1(7-37) in its C-terminally carboxylated or amidated form or as modified GLP-1 peptides and modifications thereof including those described in paragraphs 17-44 of US20050130891, and derivatives derived from GLP-1-(7-34)COOH and the corresponding acid amide are employed which have the following general formula:

R-NH-HAEGTFTSDVSYLEGQAAKEFIAWLVK-CONH₂

wherein R=H or an organic compound having from 1 to 10 carbon atoms.

[0569] Preferably, R is the residue of a carboxylic acid. Particularly preferred are the following carboxylic acid residues: formyl, acetyl, propionyl, isopropionyl, methyl, ethyl, propyl, isopropyl, n-butyl, sec-butyl, tert-butyl.) and glp-1 (glucagon-like peptide-1), glucocorticoid antagonists, glucose transporter inhibitors, growth hormone secretagogues (such as those disclosed and specifically described in U.S. Pat. No. 5,536,716), interleukin-6 (IL-6) and modulators thereof (as in WO03/057237, and the like), L-carnitine, Mc3r (melanocortin 3 receptor) agonists, MCH₂R (melanin concentrating hormone 2R) agonist/antagonists, melanin concentrating hormone antagonists, melanocortin agonists (such as Melanotan II or those described in WO 99/64002 and WO 00/74679), nomame herba, phosphate transporter inhibitors, phytopharm compound 57 (CP 644,673), pyruvate, SCD-1 (stearoyl-CoA desaturase-1) inhibitors, T71 (Tularik, Inc., Boulder Colo.), Topiramate (Topimax®, indicated as an anti-convulsant which has been shown to increase weight loss), transcription factor modulators (such as those disclosed in WO03/026576), β-hydroxy steroid dehydrogenase-1 inhibitors (β-HSD-1), β-hydroxy-β-methylbutyrate, p57 (Pfizer), Zonisamide (Zonegran™, indicated as an anti-epileptic which has been shown to lead to weight loss), and the agents disclosed in US20030119428 paragraphs 20-26.

[0570] The peptides and agonists described herein can be used in therapeutic combination with one or more anti-diabetic agents, including but not limited to:

PPARγ agonists such as glitazones (e.g., WAY-120,744, AD 5075, balaglitazone, ciglitazone, darglitazone (CP-86325, Pfizer), englitazone (CP-68722, Pfizer), isaglitazone (MIT/J&J), MCC-555 (Mitsibishi disclosed in U.S. Pat. No. 5,594,016), pioglitazone (such as such as Actos™ pioglitazone; Takeda), rosiglitazone (Avandia™; Smith Kline Beecham), rosiglitazone maleate, troglitazone (Rezulin®, disclosed in U.S. Pat. No. 4,572,912), rivoglitazone (CS-011, Sankyo), GL-262570 (Glaxo Welcome), BRL49653 (disclosed in WO98/05331), CLX-0921, 5-BTZD, GW-0207, LG-100641, JJT-501 (JPNT/P&U), L-895645 (Merck), R-119702 (Sankyo/Pfizer), NN-2344 (Dr. Reddy/NN), YM-440 (Yamanouchi), LY-300512, LY-519818, R483 (Roche), T131 (Tularik), and the like and compounds disclosed in U.S. Pat. No. 4,687,777, U.S. Pat. No. 5,002,953, U.S. Pat. No. 5,741,803, U.S. Pat. No. 5,965,584, U.S. Pat. No. 6,150,383, U.S. Pat. No. 6,150,384, U.S. Pat. No. 6,166,042, U.S. Pat. No. 6,166,043, U.S. Pat. No. 6,172,090, U.S. Pat. No. 6,211,205, U.S. Pat. No. 6,271,243, U.S. Pat. No. 6,288,095, U.S. Pat. No. 6,303,640, U.S. Pat. No. 6,329,404, U.S. Pat. No. 5,994,554, WO97/10813, WO97/27857, WO97/28115, WO97/28137, WO97/27847, WO00/76488, WO03/000685, WO03/027112, WO03/035602, WO03/048130, WO03/055867,
and pharmaceutically acceptable salts thereof;
biguanides such as metformin hydrochloride (N,N-dimethylimidodicarbonimidic diamide hydrochloride, such as Glucophage™, Bristol-Myers Squibb); metformin hydrochloride with glyburide, such as Glucovance™, Bristol-Myers Squibb); buformin (Imidodicarbonimidic diamide, N-butyl-); etoformine (1-Butyl-2-ethylbiguanide, Schering A. G.); other metformin salt forms (including where the salt is chosen from the group of, acetate, benzoate, citrate, ftimarate, embonate, chlorophenoxyacetate, glycolate, palmoate, aspartate, methanesulphonate, maleate, parachlorophenoxyisobutyrate, formate, lactate, succinate, sulphate, tartrate, cyclohexanecarboxylate, hexanoate, octanoate, decanoate, hexadecanoate, octodecanoate, benzenesulphonate, trimethoxybenzoate, paratoluenesulphonate, adamantanecarboxylate, glycoxylate, glutamate, pyrrolidonecarboxylate, naphthalenesulphonate, 1-glucosephosphate, nitrate, sulphite, dithionate and phosphate), and phenformin; protein tyrosine phosphatase-1B (PTP-1B) inhibitors, such as A-401,674, KR 61639, OC-060062, OC-83839, OC-297962, MC52445, MC52453, ISIS 113715, and those disclosed in WO99/585521, WO99/58518, WO99/58522, WO99/61435, WO03/032916, WO03/032982, WO03/041729, WO03/055883, WO02/26707, WO02/26743, JP2002114768, and pharmaceutically acceptable salts and esters thereof;
sulfonylureas such as acetohexamide (e.g. Dymelor, Eli Lilly), carbutamide, chlorpropamide (e.g. Diabinese®, Pfizer), gliamilide (Pfizer), gliclazide (e.g. Diamcron, Servier Canada Inc), glimepiride (e.g. disclosed in U.S. Pat. No. 4,379,785, such as Amaryl™, Aventis), glipentide, glipizide (e.g. Glucotrol or Glucotrol XL Extended Release, Pfizer), gliquidone, glisolamide, glyburide/glibenclamide (e.g. Micronase or Glynase Prestab, Pharmacia & Upjohn and Diabeta, Aventis), tolazamide (e.g. Tolinase), and tolbutamide (e.g. Orinase), and pharmaceutically acceptable salts and esters thereof;
meglitinides such as repaglinide (e.g. Pranidin®, Novo Nordisk), KAD1229 (PF/Kissei), and nateglinide (e.g. Starlix®, Novartis), and pharmaceutically acceptable salts and esters thereof;
α glucoside hydrolase inhibitors (or glucoside inhibitors) such as acarbose (e.g. Precose™, Bayer disclosed in U.S. Pat. No. 4,904,769), miglitol (such as GLYSET™, Pharmacia & Upjohn disclosed in U.S. Pat. No. 4,639,436), camiglibose (Methyl 6-deoxy-6-[(2R,3R,4R,5S)-3,4,5-trihydroxy-2-(hydroxymethyl)piperidino]-alpha-D-glucopyranoside, Marion Merrell Dow), voglibose (Takeda), adiposine, emiglitate, pradimicin-Q, salbostatin, CKD-711, MDL-25,637, MDL-73,945, and MOR 14, and the compounds disclosed in U.S. Pat. No. 4,062,950, U.S. Pat. No. 4,174,439, U.S. Pat. No. 4,254,256, U.S. Pat. No. 4,701,559, U.S. Pat. No. 4,639,436, U.S. Pat. No. 5,192,772, U.S. Pat. No. 4,634,765, U.S. Pat. No. 5,157,116, U.S. Pat. No. 5,504,078, U.S. Pat. No. 5,091,418, U.S. Pat. No. 5,217,877, US51091 and WO01/47528 (polyamines);
α-amylase inhibitors such as tendamistat, trestatin, and A1-3688, and the compounds disclosed in U.S. Pat. No. 4,451,455, U.S. Pat. No. 4,623,714, and U.S. Pat. No. 4,273,765;
SGLT2 inhibitors including those disclosed in U.S. Pat. No. 6,414,126 and U.S. Pat. No. 6,515,117; an aP2 inhibitor such as disclosed in U.S. Pat. No. 6,548,529;
insulin secreatagogues such as linogliride, A-4166, forskilin, dibutyrl cAMP, isobutylmethylxanthine (IBMX), and pharmaceutically acceptable salts and esters thereof;
fatty acid oxidation inhibitors, such as clomoxir, and etomoxir, and pharmaceutically acceptable salts and esters thereof;
A2 antagonists, such as midaglizole, isaglidole, deriglidole, idazoxan, earoxan, and fluparoxan, and pharmaceutically acceptable salts and esters thereof; insulin and related compounds (e.g. insulin mimetics) such as biota, LP-100, novarapid, insulin detemir, insulin lispro, insulin glargine, insulin zinc suspension (lente and ultralente), Lys-Pro insulin, GLP-1 (1-36) amide, GLP-1 (73-7) (insulintropin, disclosed in U.S. Pat. No. 5,614,492), LY-315902 (Lilly), GLP-1 (7-36)-NH2), AL-401 (AutoImmune), certain compositions as disclosed in U.S. Pat. No. 4,579,730, U.S. Pat. No. 4,849,405, U.S. Pat. No. 4,963,526, U.S. Pat. No. 5,642,868, U.S. Pat. No. 5,763,396, U.S. Pat. No. 5,824,638, U.S. Pat. No. 5,843,866, U.S. Pat. No. 6,153,632, U.S. Pat. No. 6,191,105, and WO 85/05029, and primate, rodent, or rabbit insulin including biologically active variants thereof including allelic variants, more preferably human insulin available in recombinant form (sources of human insulin include pharmaceutically acceptable and sterile formulations such as those available from Eli Lilly (Indianapolis, Ind. 46285) as Humulin™ (human insulin rDNA origin), also see the THE PHYSICIAN'S DESK REFERENCE, 55.sup.th Ed. (2001) Medical Economics, Thomson Healthcare (disclosing other suitable human insulins); non-thiazolidinediones such as JT-501 and farglitazar (GW-2570/GI-262579), and pharmaceutically acceptable salts and esters thereof;
PPARα/γ dual agonists such as AR-HO39242 (Aztrazeneca), GW-409544 (Glaxo-Wellcome), BVT-142, CLX-0940, GW-1536, GW-1929, GW-2433, KRP-297 (Kyorin Merck; 5-[(2,4-Dioxo thiazolidinyl)methyl]methoxy-N-[[4-(trifluoromethyl)phenyl]methyl]benzamide), L-796449, LR-90, MK-0767 (Merck/Kyorin/Banyu), SB 219994, muraglitazar (BMS), tesaglitzar (Astrazeneca), reglitazar (JTT-501) and those disclosed in WO99/16758, WO99/19313, WO99/20614, WO99/38850, WO00/23415, WO00/23417, WO00/23445, WO00/50414, WO01/00579, WO01/79150, WO02/062799, WO03/004458, WO03/016265, WO03/018010, WO03/033481, WO03/033450, WO03/033453, WO03/043985, WO 031053976, U.S. application Ser. No. 09/664,598, filed Sep. 18, 2000, Murakami et al. Diabetes 47, 1841-1847 (1998), and pharmaceutically acceptable salts and esters thereof;
other insulin sensitizing drugs;
VPAC2 receptor agonists;
GLK modulators, such as those disclosed in WO03/015774;
retinoid modulators such as those disclosed in WO03/000249;
GSK 3β/GSK 3 inhibitors such as 4-[2-(2-bromophenyl)-4-(4-fluorophenyl-1H-imidazol-5-yl]pyridine and those compounds disclosed in WO03/024447, WO03/037869, WO03/037877, WO03/037891, WO03/068773, EP1295884, EP1295885, and the like;
glycogen phosphorylase (HGLPa) inhibitors such as CP-368,296, CP-316,819, BAYR3401, and compounds disclosed in WO01/94300, WO02/20530, WO03/037864, and pharmaceutically acceptable salts or esters thereof;
ATP consumption promotors such as those disclosed in WO03/007990; TRB3 inhibitors;
vanilloid receptor ligands such as those disclosed in WO03/049702;
hypoglycemic agents such as those disclosed in WO03/015781 and WO03/040114;
glycogen synthase kinase 3 inhibitors such as those disclosed in WO03/035663
agents such as those disclosed in WO99/51225, US20030134890, WO01/24786, and WO03/059870;
insulin-responsive DNA binding protein-1 (IRDBP-1) as disclosed in WO03/057827, and the like;
adenosine A2 antagonists such as those disclosed in WO03/035639, WO03/035640, and the like;
PPARδ agonists such as GW 501516, GW 590735, and compounds disclosed in JP10237049 and WO02/14291;
dipeptidyl peptidase IV (DP-IV) inhibitors, such as isoleucine thiazolidide, NVP-DPP728A (1-[[[2-[(5-cyanopyridin-2-yl)amino]ethyl]amino]acetyl]-2-cyano-(S)-pyrrolidine, disclosed by Hughes et al, Biochemistry, 38(36), 11597-11603, 1999), P32/98, NVP-LAF-237, P3298, TSL225 (tryptophyl-1,2,3,4-tetrahydro-isoquinoline-3-carboxylic acid, disclosed by Yamada et al, Bioorg. & Med. Chem. Lett. 8 (1998) 1537-1540), valine pyrrolidide, TMC-2A/2B/2C, CD-26 inhibitors, FE999011, P9310/K364, VIP 0177, DPP4, SDZ 274-444, 2-cyanopyrrolidides and 4-cyanopyrrolidides as disclosed by Ashworth et al, Bioorg. & Med. Chem. Lett., Vol. 6, No. 22, pp 1163-1166 and 2745-2748 (1996), and the compounds disclosed in U.S. Pat. No. 6,395,767, U.S. Pat. No. 6,573,287, U.S. Pat. No. 6,395,767 (compounds disclosed include BMS-477118, BMS-471211 and BMS 538,305), WO99/38501, WO99/46272, WO99/67279, WO99/67278, WO99/61431 WO03/004498, WO03/004496, EP 1258476, WO02/083128, WO02/062764, WO03/000250, WO03/002530, WO03/002531, WO03/002553, WO03/002593, WO03/000180, and WO03/000181;
GLP-1 agonists such as exendin-3 and exendin-4 (including the 39 aa peptide synthetic exendin-4 called Exenatide®), and compounds disclosed in US2003087821 and NZ 504256, and pharmaceutically acceptable salts and esters thereof;
peptides including amlintide and Symlin® (pramlintide acetate); and glycokinase activators such as those disclosed in US2002103199 (fused heteroaromatic compounds) and WO02/48106 (isoindolin-1-one-substituted propionamide compounds).

[0571] The peptides and agonists described herein useful in the treatment of obesity can be administered as a cotherapy with electrostimulation (US20040015201).

[0572] The peptides and agonists described herein can be used in combination therapy with agents that activate soluble guanylate cyclase, for example those described in US20040192680.

[0573] The peptides and agonists described herein can be used in combination therapy with a phosphodiesterase inhibitor. PDE inhibitors are those compounds which slow the degradation of cyclic AMP (cAMP) and/or cyclic GMP (cGMP) by inhibition of the phosphodiesterases, which can lead to a relative increase in the intracellular concentration of cAMP and/or cGMP. Possible PDE inhibitors are primarily those substances which are to be numbered among the class consisting of the PDE3 inhibitors, the class consisting of the PDE4 inhibitors and/or the class consisting of the PDE5 inhibitors, in particular those substances which can be designated as mixed types of PDE3/4 inhibitors or as mixed types of PDE3/4/5 inhibitors. By way of example, those PDE inhibitors may be mentioned such as are described and/or claimed in the following patent applications and patents: DE1470341, DE2108438, DE2123328, DE2305339, DE2305575, DE2315801, DE2402908, DE2413935, DE2451417, DE2459090, DE2646469, DE2727481, DE2825048, DE2837161, DE2845220, DE2847621, DE2934747, DE3021792, DE3038166, DE3044568, EP000718, EP0008408, EP0010759, EP0059948, EP0075436, EP0096517, EP0112987, EP0116948, EP0150937, EP0158380, EP0161632, EP0161918, EP0167121, EP0199127, EP0220044, EP0247725, EP0258191, EP0272910, EP0272914, EP0294647, EP0300726, EP0335386, EP0357788, EP0389282, EP0406958, EP0426180, EP0428302, EP0435811, EP0470805, EP0482208, EP0490823, EP0506194, EP0511865, EP0527117, EP0626939, EP0664289, EP0671389, EP0685474, EP0685475, EP0685479, JP92234389, JP94329652, JP95010875, U.S. Pat. Nos. 4,963,561, 5,141,931, WO9117991, WO9200968, WO9212961, WO9307146, WO9315044, WO9315045, WO9318024, WO9319068, WO9319720, WO9319747, WO9319749, WO9319751, WO9325517, WO9402465, WO9406423, WO9412461, WO9420455, WO9422852, WO9425437, WO9427947, WO9500516, WO9501980, WO9503794, WO9504045, WO9504046, WO9505386, WO9508534, WO9509623, WO9509624, WO9509627, WO9509836, WO9514667, WO9514680, WO9514681, WO9517392, WO9517399, WO9519362, WO9522520, WO9524381, WO9527692, WO9528926, WO9535281, WO9535282, WO9600218, WO9601825, WO9602541, WO9611917, DE3142982, DE1116676, DE2162096, EP0293063, EP0463756, EP0482208, EP0579496, EP0667345 U.S. Pat. No. 6,331,543, US20050004222 (including those disclosed in formulas I-XIII and paragraphs 37-39, 85-0545 and 557-577) and WO9307124, EP0163965, EP0393500, EP0510562, EP0553174, WO9501338 and WO9603399. PDE5 inhibitors which may be mentioned by way of example are RX-RA-69, SCH-51866, KT-734, vesnarinone, zaprinast, SKF-96231, ER-21355, BF/GP-385, NM-702 and sildenafil (Viagra®). PDE4 inhibitors which may be mentioned by way of example are RO-20-1724, MEM 1414 (R1533/R1500; Pharmacia Roche), DENBUFYLLINE, ROLIPRAM, OXAGRELATE, NITRAQUAZONE, Y-590, DH-6471, SKF-94120, MOTAPIZONE, LIXAZINONE, INDOLIDAN, OLPRINONE, ATIZORAM, KS-506-G, DIPAMFYLLINE, BMY-43351, ATIZORAM, AROFYLLINE, FILAMINAST, PDB-093, UCB-29646, CDP-840, SKF-107806, PICLAMILAST, RS-17597, RS-25344-000, SB-207499, TIBENELAST, SB-210667, SB-211572, SB-211600, SB-212066, SB-212179, GW-3600, CDP-840, MOPIDAMOL, ANAGRELIDE, IBUDILAST, AMRINONE, PIMOBENDAN, CILOSTAZOL, QUAZINONE and N-(3,5-dichloropyrid-4-yl)-3-cyclopropylmethoxy-4-difluoromethoxybenzamide. PDE3 inhibitors which may be mentioned by way of example are SULMAZOLE, AMPIZONE, CILOSTAMIDE, CARBAZERAN, PIROXIMONE, IMAZODAN, CI-930, SIGUAZODAN, ADIBENDAN, SATERINONE, SKF-95654, SDZ-MKS-492, 349-U-85, EMORADAN, EMD-53998, EMD-57033, NSP-306, NSP-307, REVIZINONE, NM-702, WIN-62582 and WIN-63291, ENOXIMONE and MILRINONE. PDE3/4 inhibitors which may be mentioned by way of example are BENAFENTRINE, TREQUINSIN, ORG-30029, ZARDAVERINE, L-686398, SDZ-ISQ-844, ORG-20241, EMD-54622, and TOLAFENTRINE. Other PDE inhibitors include: cilomilast, pentoxifylline, roflumilast, tadalafil (Clalis®), theophylline, and vardenafil (Levitra®), zaprinast (PDE5 specific).

[0574] The peptides and agonists described herein can be used in combination therapy (for example, in order to decrease or inhibit uterine contractions) with a tocolytic agent including but not limited to beta-adrenergic agents, magnesium sulfate, prostaglandin inhibitors, and calcium channel blockers.

[0575] The peptides and agonists of the invention can be used in combination therapy with an anti-neoplastic agents including but not limited to alkylating agents, epipodophyllotoxins, nitrosoureas, antimetabolites, vinca alkaloids, anthracycline antibiotics, nitrogen mustard agents, and the like. Particular anti-neoplastic agents may include tamoxifen, taxol, etoposide and 5-fluorouracil. The peptides and agonists of the invention can be used in combination therapy (for example as in a chemotherapeutic composition) with an antiviral and monoclonal antibody therapies.

[0576] The peptides and agonists of the invention can be used in combination therapy (for example, in prevention/treatment of congestive heart failure or another method described herein) with the partial agonist of the nociceptin receptor ORL1 described by Dooley et al. (The Journal of Pharmacology and Experimental Therapeutics, 283 (2): 735-741, 1997). The agonist is a hexapeptide having the amino acid sequence Ac-RYY (RK) (WI) (RK)-NH2 (“the Dooley peptide”), where the brackets show allowable variation of amino acid residue. Thus Dooley peptide can include but are not limited to KYYRWR, RYYRWR, KWRYYR, RYYRWK, RYYRWK (all-D amin acids), RYYRIK, RYYRIR, RYYKIK, RYYKIR, RYYKWR, RYYKWK, RYYRWR, RYYRWK, RYYRIK, RYYKWR, RYYKWK, RYYRWK and KYYRWK, wherein the amino acid residues are in the L-form unless otherwise specified. The peptides and agonists of the invention can also be used in combination therapy with peptide conjugate modifications of the Dooley peptide described in WO0198324. The peptides and agonists of the invention can also be used in combination therapy (for example in the prevention and/or treatment of IBS and associated bloating) with nerve-acting agents sych as lidocaine, topiramate, mexiltine, and gabapentin as described in US20060205678.

### Methods of Treatment

[0577] A number of disorders might be treated with GC-C receptor agonists and agents that increase cGMP levels including the peptides and agonists of the invention.

[0578] The peptides and agonists of the invention can be used alone or in combination therapy for the treatment or prevention of congestive heart failure. Such agents can be used in combination with natriuretic peptides (e.g., atrial natriuretic peptide, brain natriuretic peptide or C-type natriuretic peptide), a diuretic, or an inhibitor of angiotensin converting enzyme.

[0579] The peptides and agonists of the invention can be used alone or in combination therapy for the treatment or prevention of benign prostatic hyperplasia (BPH). Such agents can be used in combination with one or more agents for treatment of BPH, for example, a 5-alpha reductase inhibitor (e.g., finasteride) or an alpha adrenergic inhibitor (e.g., doxazosine).

[0580] The peptides and agonists of the invention can be used alone or in combination therapy for the treatment, prevention or reduction of visceral pain associated with a gastrointestinal disorder or pain associated with another disorder.

[0581] The peptides and agonists of the invention can be used alone or in combination therapy for the treatment or prevention of obesity-related disorders (e.g. disorders that are associated with, caused by, or result from obesity). Examples of obesity-related disorders include overeating and bulimia, hypertension, diabetes, elevated plasma insulin concentrations and insulin resistance, dyslipidemias, hyperlipidemia, endometrial, breast, prostate and colon cancer, osteoarthritis, obstructive sleep apnea, cholelithiasis, gallstones, heart disease, abnormal heart rhythms and arrhythmias, myocardial infarction, congestive heart failure, coronary heart disease, sudden death, stroke, polycystic ovarian disease, craniopharyngioma, the Prader-Willi Syndrome, Frohlich's syndrome, GH-deficient subjects, normal variant short stature, Turner's syndrome, and other pathological conditions showing reduced metabolic activity or a decrease in resting energy expenditure as a percentage of total fat-free mass, e.g., children with acute lymphoblastic leukemia. The agents of the invention may be used to reduce or control body weight (or fat) or to prevent and/or treat obesity or other appetite related disorders related to the excess consumption of food, ethanol and other appetizing substances. The agents may be used to modulate lipid metabolism, reduce body fat (e.g. via increasing fat utilization) or reduce (or suppress) appetite (e.g. via inducing satiety). Further examples of obesity-related disorders are metabolic syndrome, also known as syndrome X, insulin resistance syndrome, sexual and reproductive dysfunction, such as infertility, hypogonadism in males and hirsutism in females, gastrointestinal motility disorders, such as obesity-related gastroesophageal reflux, respiratory disorders, such as obesity-hypoventilation syndrome (Pickwickian syndrome), cardiovascular disorders, inflammation, such as systemic inflammation of the vasculature, arteriosclerosis, hypercholesterolemia, hyperuricaemia, lower back pain, gallbladder disease, gout, and kidney cancer. The agents of the present invention are also useful for reducing the risk of secondary outcomes of obesity, such as reducing the risk of left ventricular hypertrophy.

[0582] The peptides and agonists of the invention can be used alone or in combination therapy for the treatment or prevention of gastrointestinal related disorders including: chronic intestinal pseudo-obstruction (Ogilvie's syndrome), colonic pseudoobstruction, Crohn's disease, dyspepsia (including functional dyspepsia or nonulcer dyspepsia), duodenogastric reflux, functional bowel disorder, functional gastrointestinal disorders, functional heartburn, gastroesophageal reflux disease (GERD), gastrointestinal motility disorders, gastroparesis (e.g. idopathic gastroparesis), hypertrophic pyloric stenosis, Inflammatory bowel disease, irritable bowel syndrome (IBS), post-operative ileus, and ulcerative colitis. The peptides and agonists of the invention can be used alone or in combination therapy to patient suffering from or susceptible to GI disorders relating to damage to the GI tract stemming from impact or surgical intervention. The peptides and agonists of the invention can be used alone or in combination therapy to patients at risk for or having particular diseases associated with hypomotility (e.g. colonic inertia) or stasis in the GI tract. For example, diabetic neuropathy, anorexia nervosa, and achlorhydria are frequently accompanied by gastric hypomotility. Damage to the GI tract following surgical intervention, for instance, can result in substantial gastric stasis. The peptides and agonists of the invention can be administered alone or in combination therapy to patients susceptible to or having a GI disorder associated with diabetes (e.g. diabetic gastropathy). The peptides and agonists of the invention can be used alone or in combination therapy to prevent and/or treat GI disorders characterized by at least one of nausea, vomiting, heartburn, postprandial discomfort, diarrhea, constipation, indigestion or related symptoms. The peptides and agonists of the invention can be used alone or in combination therapy to prevent and/or treat GI disorders associated with at least one of diabetes, anorexia nervosa, bulimia, achlorhydria, achalasia, anal fissure, haemorrhoids, irritable bowel syndrome, intestinal pseudoobstruction, scleroderma and gastrointestinal damage.

[0583] The peptides and agonists of the invention can be used to prevent and/or treat constipation. Constipation can be used to describe bowel patterns which include one or more of hard, small, infrequent stools; the sensation of difficulty in passing stool, specifically excessive or ineffectual straining; the sensation of incomplete evacuation. Constipation has also been described as the passage of stool less than a certain number (e.g. 3) of times per week. A number of conditions can be associated with constipation. Constipation can be associated with numerous disorders and conditions. For example, constipation can be (1) associated with the use of a therapeutic agent (e.g. antihypertensives, anticonvulsants, antispasmodics, analgesics, anticholinergics, antidepressants, antipsychotics, cation-containing agents, anticonvulsants, ganglion blockers, vinca alkaloids); (2) associated with a muscular, neuropathic, metabolic or endocrine disorder (including but not limited to myotonic dystrophy, dermamyositis, systemic sclerosis, sclerodoma, amyloidosis (neurologic or muscular), ischemia, tumor of the central nervous system, autonomic neuropathy, Chagas disease, cystic fibrosis, diabetes mellitus, Hirschsprung disease, hyperthyroidism, hypocalcaemia, hypothyroidism, Multiple Sclerosis, neurofibromatosis, Parkinson's disease, and spinal cord lesions (for example, related to sacral nerve damage related to trauma or a tumor or the enteric nervous system)); (3) post-surgical constipation (postoperative ileus); (4) associated with a structural colon alteration (for example that associated with Neoplasm, stricture, volvulus, anorectal, inflammation, prolapse, rectocele, or fissure); (5) associated with the a gastrointestinal disorder; (6) associated with a systemic illness or disorder (for example, electrolyte abnormalities, thyroid disease, diabetes mellitus, panhypopituitarism, Addison's disease, pheochromocytoma, uremia, porphyria); (7) chronic constipation; (8) associated with the use of analgesic drugs (e.g. opioid induced constipation); (9) associated with megacolon; and (10) idiopathic constipation (functional constipation). Functional constipation can be associated with normal transit, slow transit (e.g. one or fewer bowel movements per week) and pelvic floor dyssynergia. Pelvic floor dyssynergia is considered a disorder of the rectum and anus although these patients also have abnormal contractions throughout the colon. Patients with pelvic floor dyssynergia have abnormal colonic pressure waves prior to defecation and present with symptoms that may include a sensation of incomplete evacuation, excessive straining, a need for digital disimpaction, perianal heaviness, and tenesmus. Constipation can be associated with bloating and abdominal pain. The peptides and agonists of the invention can be used to prevent and/or treat low stool frequency or poor stool consistency.

[0584] The peptides and agonists of the invention can be used to treat decreased intestinal motility, slow digestion or slow stomach emptying. The peptides and agonists can be used to relieve one or more symptoms of IBS (bloating, pain, constipation), GERD (acid reflux into the esophagus), duodenogastric reflux, functional dyspepsia, or gastroparesis (nausea, vomiting, bloating, delayed gastric emptying) and other disorders described herein. The peptides and agonists of the invention can be used to treat flatulence.

[0585] The peptides and agonists of the invention can be used to increase intestinal motility, slow colonic transit, and to prevent and/or treat gastrointestinal immotility and other conditions calling for laxative or stool softener therapy. Gastrointestinal immotility can include constipation, and also includes delayed oral cecal transit time, irregular Taxation, and other related gastrointestinal motility disfunction including impaction. Impaction is a condition where a large mass of dry, hard stool develops in the rectum, often due to chronic constipation. This mass may be so hard that it cannot be excreted. The subjects affected by constipation or gastrointestinal immotility can be refractory to laxative therapy and/or stool softener therapy.

[0586] The peptides and agonists of the invention can be used for the treatment or prevention of cancer, pre-cancerous growths, or metastatic growths. For example, they can be used for the prevention or treatment of: colorectal/local metastasized colorectal cancer, intestinal polyps, gastrointestinal tract cancer, lung cancer, cancer or pre-cancerous growths or metastatic growths of epithelial cells, polyps, breast, colorectal, lung, ovarian, pancreatic, prostatic, renal, stomach, bladder, liver, esophageal and testicular carcinoma, carcinoma (e.g., basal cell, basosquamous, Brown-Pearce, ductal carcinoma, Ehrlich tumor, Krebs, Merkel cell, small or non-small cell lung, oat cell, papillary, bronchiolar, squamous cell, transitional cell, (Walker), leukemia (e.g., B-cell, T-cell, HTLV, acute or chronic lymphocytic, mast cell, myeloid), histiocytonia, histiocytosis, Hodgkin's disease, non-Hodgkin's lymphoma, plasmacytoma, reticuloendotheliosis, adenoma, adeno-carcinoma, adenofibroma, adenolymphoma, ameloblastoma, angiokeratoma, angiolymphoid hyperplasia with eosinophilia, sclerosing angioma, angiomatosis, apudoma, branchionia, malignant carcinoid syndrome, carcinoid heart disease, carcinosarcoma, cementoma, cholangioma, cholesteatoma, chondrosarcoma, chondroblastoma, chondrosarcoma, chordoma, choristoma, craniopharyngioma, chrondroma, cylindroma, cystadenocarcinoma, cystadenoma, cystosarconia phyllodes, dysgenninoma, ependymoma, Ewing sarcoma, fibroma, fibrosarcoma, giant cell tumor, ganglioneuroma, glioblastoma, glomangioma, granulosa cell tumor, gynandroblastoma, hamartoma, hemangioendothelioma, hemangioma, hemangio-pericytoma, hemangiosarcoma, hepatoma, islet cell tumor, Kaposi sarcoma, leiomyoma, leiomyosarcoma, leukosarcoma, Leydig cell tumor, lipoma, liposarcoma, lymphaugioma, lymphangiomyoma, lymphangiosarcoma, medulloblastoma, meningioma, mesenchymoma, mesonephroma, mesothelioma, myoblastoma, myoma, myosarcoma, myxoma, myxosarcoma, neurilemmoma, neuroma, neuroblastoma, neuroepithelioma, neurofibroma, neurofibromatosis, odontoma, osteoma, osteosarcoma, papilloma, paraganglioma, paraganglionia. nonchromaffin, pinealoma, rhabdomyoma, rhabdomyosarcoma, Sertoli cell tumor, teratoma, theca cell tumor, and other diseases in which cells have become dysplastic, immortalized, or transformed.

[0587] The peptides and agonists of the invention can be used for the treatment or prevention of: Familial Adenomatous Polyposis (FAP) (autosomal dominant syndrome) that precedes colon cancer, hereditary nonpolyposis colorectal cancer (HNPCC), and inherited autosomal dominant syndrome.

[0588] For treatment or prevention of cancer, pre-cancerous growths and metastatic growths, the peptides and agonists of the invention can be used in combination therapy with radiation or chemotherapeutic agents, an inhibitor of a cGMP-dependent phosphodiesterase or a selective cyclooxygenase-2 inhibitor. A number of selective cyclooxygenase-2 inhibitors are described in US20010024664, U.S. Pat. No. 5,380,738, U.S. Pat. No. 5,344,991, U.S. Pat. No. 5,393,790, U.S. Pat. No. 5,434,178, U.S. Pat. No. 5,474,995, U.S. Pat. No. 5,510,368, WO02/062369, WO 96/06840, WO 96/03388, WO 96/03387, WO 96/19469, WO 96/25405, WO 95/15316, WO 94/15932, WO 94/27980, WO 95/00501, WO 94/13635, WO 94/20480, and WO 94/26731, the disclosures of which are herein incorporated by reference. [Pyrazol-1-yl]benzenesulfonamides have also been described as inhibitors of cyclooxygenase-2.

[0589] The peptides and agonists of the invention can be used in the treatment or prevention of inflammation. Thus, they can be used alone or in combination with an inhibitor of cGMP-dependent phosphodiesterase or a selective cyclooxygenase-2 inhibitor for treatment of: organ inflammation, IBD (e.g., Crohn's disease, ulcerative colitis), asthma, nephritis, hepatitis, pancreatitis, bronchitis, cystic fibrosis, ischemic bowel diseases, intestinal inflammations/allergies, coeliac disease, proctitis, eosinophilic gastroenteritis, mastocytosis, and other inflammatory disorders. The peptides and agonists of the invention can be used alone or in combination therapy in the treatment or prevention of gastrointestinal tract inflammation (e.g. inflammation associated with a gastrointestinal disorder, gastrointestinal tract infection, or another disorder). They can be used alone or in combination therapy with phenoxyalkycarboxylic acid derivatives for the treatment of interstitial cystitis, irritable bowel syndrome, ulcerative colitis, and other inflammatory conditions, as mentioned in US20050239902A1.

[0590] The peptides and agonists of the invention can also be used to treat or prevent insulin-related disorders, for example: II diabetes mellitus, hyperglycemia, obesity, disorders associated with disturbances in glucose or electrolyte transport and insulin secretion in cells, or endocrine disorders. They can be also used in insulin resistance treatment and post-surgical and non-post surgery decrease in insulin responsiveness.

[0591] The peptides and agonists of the invention can be used to prevent and/or treat pulmonary and respiratory related disorders, including, inhalation, ventilation and mucus secretion disorders, pulmonary hypertension, chronic obstruction of vessels and airways, acute respiratory failure, and irreversible obstructions of vessels and bronchi. One may administer an agent of the invention for treating bronchospasm, for inducing bronchodilation, for treating chronic obstructive pulmonary disease (including chronic bronchitis with normal airflow), for treating asthma (including bronchial asthma, intrinsic asthma, extrinsic asthma, acute asthma, chronic or inveterate asthma (e.g. late asthma and airways hyper-responsiveness), dust-induced asthma, allergen-induced asthma, viral-induced asthma, cold-induced asthma, pollution-induced asthma and exercise-induced asthma) and for treating rhinitis (including acute-, allergic, hatrophic rhinitis or chronic rhinitis (such as rhinitis caseosa, hypertrophic rhinitis, rhinitis purulenta, rhinitis sicca), rhinitis medicamentosa, membranous rhinitis (including croupous, fibrinous and pseudomembranous rhinitis), scrofulous rhinitis, perennial allergic rhinitis, seasonal rhinitis (including rhinitis nervosa (hay fever) and vasomotor rhinitis). The peptides of the invention may also be useful in the treatment of dry eye disease and chronic sinusitis. The peptides of the invention may also be used to prevent and/or treat disorders characterized by acute pulmonary vasoconstriction such as may result from pneumonia, traumatic injury, aspiration or inhalation injury, fat embolism in the lung, acidosis inflammation of the lung, adult respiratory distress syndrome, acute pulmonary edema, acute mountain sickness, post-cardiac surgery, acute pulmonary hypertension, persistent pulmonary hypertension of the newborn, perinatal aspiration syndrome, hyaline membrane disease, acute pulmonary thromboembolism, herapin-protamine reactions, sepsis, status asthmaticus or hypoxia (including iatrogenic hypoxia) and other forms of reversible pulmonary vasoconstriction.

[0592] Such pulmonary disorders also are also characterized by inflammation of the lung including those associated with the migration into the lung of nonresident cell types including the various leucocyte subclasses. Also included in the respiratory disorders contemplated are: bullous disease, cough, chronic cough associated with inflammation or iatrogenic induced, airway constriction, pigeon fancier's disease, eosinophilic bronchitis, asthmatic bronchitis, chronic bronchitis with airway obstruction (chronic obstructive bronchitis), eosinophilic lung disease, emphysema, farmer's lung, allergic eye diseases (including allergic conjunctivitis, vernal conjunctivitis, vernal keratoconjunctivitis, and giant papillary conjunctivitis), idiopathic pulmonary fibrosis, cystic fibrosis, diffuse pan bronchiolitis and other diseases which are characterized by inflammation of the lung and/or excess mucosal secretion. Other physiological events which are contemplated to be prevented, treated or controlled include platelet activation in the lung, chronic inflammatory diseases of the lung which result in interstitial fibrosis, such as interstitial lung diseases (ILD) (e.g., idiopathic pulmonary fibrosis, or ILD associated with rheumatoid arthritis, or other autoimmune conditions), chronic obstructive pulmonary disease (COPD) (such as irreversible COPD), chronic sinusitis, fibroid lung, hypersensitivity lung diseases, hypersensitivity pneumonitis, idiopathic interstitial pneumonia, nasal congestion, nasal polyposis, and otitis media.

[0593] The peptides and agonists of the invention can be used alone or in combitherapy to prevent or treat: retinopathy, nephropathy, diabetic angiopathy, and edema formation

[0594] The peptides and agonists of the invention can be used alone or in combitherapy to prevent or treat neurological disorders, for example, headache, tension-type headache, migraines, anxiety, stress, cognitive disorders, cerebral ischemia, brain trauma, movement disorders, aggression, psychosis, seizures, panic attacks, hysteria, sleep disorders, depression, schizoaffective disorders, sleep apnea, attention deficit syndromes, memory loss, dementia, memory and learning disorders as discussed in Moncada and Higgs 1995 FASEB J. 9:1319-1330; Severina 1998 Biochemistry 63:794; Lee et al. 2000 PNAS 97: 10763-10768; Hobbs 1997 TIPS 18:484-491; Murad 1994 Adv. Pharmacol. 26:1-335; and Denninger et al. 1999 Biochim. Biophys. Acta 1411:334-350 and narcolepsy. They may also be used as a sedative.

[0595] The peptides and detectably peptides and agonists of the invention can be used as markers to identify, detect, stage, or diagnosis diseases and conditions of small intestine, including, without limitation: Crohn's disease, colitis, inflammatory bowel disease, tumors, benign tumors, such as benign stromal tumors, adenoma, angioma, adenomatous (pedunculated and sessile) polyps, malignant, carcinoid tumors, endocrine cell tumors, lymphoma, adenocarcinoma, foregut, midgut, and hindgut carcinoma, gastroinstestinal stromal tumor (GIST), such as leiomyorna, cellular leiomyoma, leiomyoblastoma, and leiomyosarcoma, gastrointestinal autonomic nerve tumor, malabsorption syndromes, celiac diseases, diverticulosis, Meckel's diverticulum, colonic diverticula, megacolon, Hirschsprung's disease, irritable bowel syndrome, mesenteric ischemia, ischemic colitis, colorectal cancer, colonic polyposis, polyp syndrome, intestinal adenocarcinoma, Liddle syndrome, Brody myopathy, infantile convulsions, and choreoathetosis

[0596] The peptides and agonists of the invention can be conjugated to another molecule (e.g., a diagnostic or therapeutic molecule) to target cells bearing the GC-C receptor, e.g., cystic fibrosis lesions and specific cells lining the intestinal tract. Thus, they can be used to target radioactive moieties or therapeutic moieties (active moieties like a radionuclide, an enzyme, a fluorescent label, a metal chelating group, a chemiluminescent label, a bioluminescent label, a chemotherapeutic, a toxin, an inactive prodrug, a radiosensitizing agent, a photodynamic agent) to the intestine to aid in imaging and diagnosing or treating colorectal/metastasized or local colorectal cancer. In addition, they can be used to deliver antisense molecules or nucleic acid molecules (like normal copies of the p53 tumor suppressor gene) to the intestinal tract. The peptides and agonists of the invention can also be used to increase the number of GC-C molecules on the surface of a cell. In some embodiments the cell is a metastasized colorectal cancer cell. In one embodiment the peptide or agonist of the invention is therapeutically conjugated to a second agent. In certain embodiments, the second agent can be radioactive or radiostable. In certain embodiments the second agent can be selected from the group consisting of a compound that causes cell death, a compound that inhibits cell division, a compound that induces cell differentiation, a chemotherapeutic, a toxin and a radiosensitizing agent. In certain embodiments the second agent can be selected from the group consisting of: methotrexate, doxorubicin, daunorubicin, cytosinarabinoside, etoposide, 5-4 fluorouracil, melphalan, chlorambucil, cis-platin, vindesine, mitomycin, bleomycin, purothionin, macromomycin, 1,4-benzoquinone derivatives, trenimon, ricin, ricin A chain, Pseudomonas exotoxin, diphtheria toxin, Clostridium perfringens phospholipase C, bovine pancreatic ribonuclease, pokeweed antiviral protein, abrin, abrin A chain, cobra venom factor, gelonin, saporin, modeccin, viscumin, volkensin, nitroimidazole, metronidazole and misonidazole. In certain embodiments the second agent can be a cytoxic agent selected from the group consisting of cemadotin, a derivative of cemadotin, a derivative of hemiasterlin, esperamicin C, neocarzinostatin, maytansinoid DM1,7-chloromethyl-10,11 methylenedioxy-camptothecin, rhizoxin, and the halichondrin B analog, ER-086526.

[0597] The peptides and agonists of the invention can be used alone or in combination therapy to prevent and/or treat inner ear disorders, e.g., to prevent and/or treat Meniere's disease (including symptoms thereof such as vertigo, hearing loss, tinnitus, sensation of fullness in the ear), Mal de débarquement syndrome, otitis externa, otitis media, otorrhea, acute mastoiditis, otosclerosis, otic pain, otic bleeding, otic inflammation, Lermoyez's syndrome, vestibular neuronitis, benign paroxysmal positional vertigo (BPPV), herpes zoster oticus, Ramsay Hunt's syndrome, herpes, labyrinthitis, purulent labyrinthitis, perilymph fistulas, presbycusis, ototoxicity (including drug-induced ototoxicity), neuromias (including acoustic neuromas), aerotitis media, infectious myringitis, bullous myringitis, squamous cell carcinoma, basal cell carcinoma, pre-cancerous otic conditions, nonchromaffin paragangliomas, chemodectomas, glomus jugulare tumors, glomus tympanicum tumors, perichondritis, aural eczematoid dermatitis, malignant external otitis, subperichondrial hematoma, ceruminomas, impacted cerumen, sebaceous cysts, osteomas, keloids, otalgia, tinnitus, tympanic membrane infection, tympanitis, otic furuncles, petrositis, conductive and sensorineural hearing loss, epidural abscess, lateral sinus thrombosis, subdural empyema, otitic hydrocephalus, Dandy's syndrome, bullous myringitis, diffuse external otitis, foreign bodies, keratosis obturans, otic neoplasm, otomycosis, trauma, acute barotitis media, acute eustachian tube obstruction, postsurgical otalgia, cholesteatoma, infections related to an otic surgical procedure, and complications associated with any of said disorders. The peptides and agonists of the invention can be used alone or in combination therapy to maintain fluid homeostasis in the inner ear. neuronitis (including viral neuronitis), ganglionitis, geniculate

[0598] The peptides and agonists of the invention can be used alone or in combination therapy to prevent and/or treat disorders associated with fluid and sodium retention, e.g., diseases of the electrolyte-water/electrolyte transport system within the kidney, gut and urogenital system, congestive heart failure, hypertension, hypotension, salt dependent forms of high blood pressure, hepatic edema, and liver cirrhosis. In addition they can be used to facilitate diuresis or control intestinal fluid. The peptides and agonists of the invention can also be used to treat disorders where there is abnormal proliferation of epithelial cells within the kidney (e.g. as in the case of renal cancer).

[0599] The peptides and agonists of the invention can be used alone or in combination therapy to prevent and/or treat kidney disease. “Kidney disease” includes renal failure (including acute renal failure), renal insufficiency, nephrotic edema, glomerulonephritis, pyelonephritis, kidney failure, chronic renal failure, nephritis, nephrosis, azotemia, uremia, immune renal disease, acute nephritic syndrome, rapidly progressive nephritic syndrome, nephrotic syndrome, Berger's Disease, chronic nephritic/proteinuric syndrome, tubulointerstital disease, nephrotoxic disorders, renal infarction, atheroembolic renal disease, renal cortical necrosis, malignant nephroangiosclerosis, renal vein thrombosis, renal tubular acidosis, renal glucosuria, nephrogenic diabetes insipidus, Bartter's Syndrome, Liddle's Syndrome, polycystic kidney disease, medullary cystic disease, medullary sponge kidney, hereditary nephritis, and nail-patella syndrome, along with any disease or disorder that relates to the renal system and related disorders, as well as symptoms indicative of, or related to, renal or kidney disease and related disorders.

[0600] The peptides and agonists of the invention can be used alone or in combination therapy to prevent or treat polycystic kidney disease. Polycystic kidney disease” “PKD” (also called “polycystic renal disease”) refers to a group of disorders characterized by a large number of cysts distributed throughout dramatically enlarged kidneys. The resultant cyst development leads to impairment of kidney function and can eventually cause kidney failure. “PKD” specifically includes autosomal dominant polycystic kidney disease (ADPKD) and recessive autosomal recessive polycystic kidney disease (ARPKD), in all stages of development, regardless of the underlying cause.

[0601] The peptides and agonists of the invention can be used alone or in combination therapy to prevent and/or treat disorders associated with bicarbonate secretion, e.g., Cystic Fibrosis.

[0602] The peptides and agonists of the invention can be used alone or in combination therapy to prevent and/or treat disorders associated with bile secretion. In addition, they can be used to facilitate or control chloride and bile fluid secretion in the gall bladder.

[0603] The peptides and agonists of the invention can be used alone or in combination therapy to prevent and/or treat disorders associated with liver cell regeneration. This may include administration of the peptides and agonists to liver transplant recipients and to patients with drug or alcohol induced-liver damage. Furthermore, the peptides and agonists may be useful to treat liver damage as in the case of viral mediated hepatitis. The peptides and agonists of the invention may be used alone or in combination to prevent and/or treat liver abscess, liver cancer (either primary or metastatic), cirrhosis (such as cirrhosis caused by the alcohol consumption or primary biliary cirrhosis), amebic liver abscess, autoimmune hepatitis, biliary atresia, coccidioidomycosis disseminated, δ agent (hepatitis δ), hemochromatosis, hepatitis a, hepatitis b, hepatitis c, or any other acute, subacute, fulminant or chronic hepatitis of viral, metabolic or toxic etiology, hepatocellular carcinoma, pyogenic liver abscess, Reye's syndrome, sclerosing cholangitis, Wilson's disease, drug induced hepatotoxicity, or fulminant or acute liver failure. The peptides and agonists may be used in stimulating hepatic regeneration after surgical hepatectomy.

[0604] The peptides and agonists of the invention can be used alone or in combination therapy to prevent and/or treat myocardial infraction, coronary artery disease, nitrate-induced tolerance, nitrate tolerance, diastolic dysfunction, angina pectoris, stable, unstable and variant (Prinzmetal) angina, atherosclerosis, thrombosis, endothelial dysfunction, cardiac edema, stroke, conditions of reduced blood vessel patency, e.g., postpercutaneous transluminal coronary angioplasty (post-PTCA), and peripheral vascular disease.

[0605] The peptides and agonists of the invention can be used alone or in combination therapy to prevent and/or treat glaucoma.

[0606] The peptides and agonists of the invention can be used alone or in combination therapy to prevent and/or treat immunodeficiency.

[0607] The peptides and agonists of the invention can be used alone or in combination therapy to prevent and/or treat bladder outlet obstruction and incontinence.

[0608] The peptides and agonists of the invention can be used alone or in combination therapy to prevent and/or treat male (e.g. erectile dysfunction) or female sexual dysfunction, dysmenorrhea, endometriosis, polycystic ovary syndrome, vaginal dryness, uterine pain, or pelvic pain. These peptides and agonists of the invention can be utilized as tocolytic agents that decrease or arrest uterine contractions. The peptides and agonists of the invention can be used to prevent/treat premature/preterm labor. Premature or preterm labor can be associated with, for example, an illness/disorder/condition of the mother (such as pre-eclampsia, high blood pressure or diabetes, abnormal shape or size of the uterus, weak or short cervix, hormone imbalance, vaginal infection that spreads to the uterus, abnormalities of the placenta, such as placenta previa, and excessive amniotic fluid), premature rupture of the amniotic membranes (“water breaks”), large fetus, and more than one fetus. The peptides or agonists of the invention can be used to prevent uterine rupture. The peptides or agonists of the invention can be used treat rapid uterine contractions (for example, associated with placental abruption wherein the placental abruption is associated with hypertension, diabetes, a multiply pregnancy, an unusually large amount of amniotic fluid, numerous previous deliveries, or advanced maternal age (e.g. >40 years old). In certain embodiments they can be used in combination with a phosphodiesterase inhibitor. The peptides and agonists of the invention can be used alone or in combination therapy to prevent and/or treat infertility, for example, male infertility due to poor sperm quality, decreased sperm motility or low sperm count.

[0609] The peptides and agonists of the invention can be used alone or in combination therapy to prevent and/or treat osteopenia disorders (bone loss disorders). “Bone loss disorders” include conditions and diseases wherein the inhibition of bone loss and/or the promotion of bone formation is desirable. Among such conditions and diseases are osteoporosis, osteomyelitis, Paget's disease (osteitis deformans), periodontitis, hypercalcemia, osteonecrosis, osteosarcoma, osteolyic metastases, familial expansile osteolysis, prosthetic loosening, periprostetic osteolysis, bone loss attendant rheumatoid arthritis, and cleiodocranial dysplasia (CCD). Osteoporosis includes primary osteoporosis, endocrine osteoporosis (hyperthyroidism, hyperparathyroidism, Cushing's syndrome, and acromegaly), hereditary and congenital forms of osteoporosis (osteogenesis imperfecta, homocystinuria, Menkes' syndrome, and Rile-Day syndrome) and osteoporosis due to immobilization of extremitiesosteomyelitis, or an infectious lesion in bone leading to bone loss. The peptides and agonists can be used alone or in combination therapy to stimulating bone regeneration. The bone regeneration may be following reconstruction of bone defects in cranio-maxillofacial surgery, or following an implant into bone, for example a dental implant, bone supporting implant, or prosthesis. The bone regeneration may also be following a bone fracture.

[0610] The peptides and agonists of the invention may be used alone or in combination therapy (for example, with other agents that increase cGMP) to prevent or treat disorders related to an alteration in cGMP including, but not limited to Alzheimer's disease, psoriasis, skin necrosis, scarring, fibrosis, baldness, Kawasaki's Disease, nutcracker oesophagus (US20050245544), septic shock, NSAID-induced gastric disease or disorder, ischemic renal disease or disorder, peptic ulcer, sickle cell anemia, epilepsy, and a neuroinflammatory disease or disorder (for example as described in WO05105765).

### Treatment of the Side-Effects of Opioid Administration

[0611] GGC receptor agonists, e.g., GCC receptor agonist polypeptides described herein, may useful in the treatment of one or more side effects of opioid administration, e.g., opioid induced constipation, nausea and/or vomiting. In the case of constipation, the GCC receptor agonist polypeptide can be administered at a dosage to induce Taxation within a desired time (e.g., within 15 minutes, 30 minutes, 1 hour, 2 hours, 3 hours, 4 hours, 5 hours, 6 hours, 7 hours, 8 hours, 9 hours, 10 hours, 12 hours, 18 hours or 24 hours).

[0612] The GCC receptor agonist polypeptide can be administered to maintain regular bowel movements in a patient who is a chronic opioid user (e.g., a terminally-ill patient). The administration can be via any convenient route (e.g., sublingual, parenteral, intravenous, subcutaneous).

[0613] Thus, the polypeptides described herein can be administered to a patient that is taking one or more of the following opioids: Acetorphine, Acetyldihydrocodeine, Acetylmorphone, Alfentanil, Allylprodine, Anileridine, Bemidone, Benzylmorphine, Bezitramide, Buprenorphine, Butorphanol, Carfentanil/Carfentanyl, Clonitazene, Codeine, Codeine-N-Oxide, Codeinone, Cyclazocine, Cyclorphan, Desomorphine, Dextromoramide, Dextropropoxyphene, Dezocine, Diacetyldihydromorphine, Diamorphine/Diacetylmorphine (Heroin), Diethylthiambutene, Difenoxin, Dihydrocodeine, Dihydrocodeinone Enol Acetate, Dihydroetorphine, Dihydroisocodeine, Dihydromorphine, Dimethylthiambutene, Diphenoxylate, Dipropanoylmorphine, Drobetabol, Ethylketocyclazocine, Ethylmorphine, Etonitazene, Etorphine, Fentanyl, Hydrocodone, Hydromorphone, Isomethadone, Ketobemidone, Laudanum, Lefetamine, Levallorphan, Levo-Alphacetylmethadol (LAAM), Levomethorphan, Levorphanol, Loperamide, Meptazinol, Metazocine, Methadone, Monoacetylmorphine, Morphine, Morphine-6-Glucuronide, Morphine-N-Oxide, Morphinone, MPPP (1-Methyl 4-Phenyl 4-Propionoxypiperidine), Myorphine, Nalbuphine/Nalbufine, Nicocodeine, Nicodicodeine, Nicomorphine, Norcodeine, Ohmefentanyl, Oxycodone, Oxymorphone, Pentazocine, PEPAP (1-Phenethyl-4-Phenyl-4-Piperidinol Acetate (Ester)), Pethidine (Meperidine), Phenadoxone, Phenazocine, Phenoperidine, Pholcodeine, Piminodine, Piritramide, Prodine, Propiram, Propoxyphene, Racemethorphan, Remifentanil, Sufentanil, Thebaine, Thiofentanil/Thiofentanyl, Tilidine, and Tramadol. The peptide can be co-administered with or co-formulated with any of the preceeding peptides.

[0614] Where the GCC receptor agonist is co-formulated with an opioid the composition may further include one or more other active ingredients that may be conventionally employed in analgesic and/or cough-cold-antitussive combination products. Such conventional ingredients include, for example, aspirin, acetaminophen, phenylpropanolamine, phenylephrine, chlorpheniramine, caffeine, and/or guaifenesin. Typical or conventional ingredients that may be included in the opioid component are described, for example, in the Physicians' Desk Reference, 1999, the disclosures of which are hereby incorporated herein by reference, in their entirety.

[0615] In addition, the composition may further include one or more compounds that may be designed to enhance the analgesic potency of the opioid and/or to reduce analgesic tolerance development. Such compounds include, for example, dextromethorphan or other NMDA antagonists (Mao, M. J. et al., Pain 1996, 67, 361), L-364,718 and other CCK antagonists (Dourish, C. T. et al., Eur J Pharmacol 1988, 147, 469), NOS inhibitors (Bhargava, H. N. et al., Neuropeptides 1996, 30, 219), PKC inhibitors (Bilsky, E. J. et al., J Pharmacol Exp Ther 1996, 277, 484), and dynorphin antagonists or antisera (Nichols, M. L. et al., Pain 1997, 69, 317). The disclosures of each of the foregoing documents are hereby incorporated herein by reference, in their entireties.

[0616] The combination products, such as pharmaceutical compositions comprising opioids in combination with a GCC agonist may be in any dosage form, such as those described herein, and can also be administered in various ways, as described herein. In one embodiment, the combination products of the invention are formulated together, in a single dosage form (that is, combined together in one capsule, tablet, powder, or liquid, etc.). When the combination products are not formulated together in a single dosage form, the opioid compounds and the GCC agonists may be administered at the same time (that is, together), or in any order. When not administered at the same time, the administration of an opioid and a GCC agonist occurs less than about one hour apart, less than about 30 minutes apart, less than about 15 minutes apart, and less than about 5 minutes apart. Administration of the combination of an opioid and a GCC agonist can be, for example, oral, although other routes of administration, as described above, are contemplated to be within the scope of the present invention. Although it is the opioids and GCC agonists can both be administered in the same fashion (that is, for example, both orally), if desired, they may each be administered in different fashions (that is, for example, one component of the combination product may be administered orally, and another component may be administered intravenously). The dosage of the combination products of the invention may vary depending upon various factors such as the pharmacodynamic characteristics of the particular agent and its mode and route of administration, the age, health and weight of the recipient, the nature and extent of the symptoms, the kind of concurrent treatment, the frequency of treatment, and the effect desired.

[0617] Although the proper dosage of the combination products of this invention will be readily ascertainable by one skilled in the art, by way of general guidance, where an opioid compounds is combined with a GCC agonist, for example, typically a daily dosage may range from about 0.01 to about 100 milligrams, 0.1 to about 10 milligrams of the opioid, 15 to about 200 milligrams, 1, 2, 3, 4, 5, 6, 7, 8, 9, 10 milligrams of opioid per kilogram of patient body weight. The opioid-GCC agonist combination product can include, for example, from 1 to 30 μg, 1 to 40 μg, 1 to 50 μg, 1 to 100 μg, 1 to 200 μg, 1 to 300 μg, 1 to 400 μg, 1 to 500 μg, 1 to 600 μg, 1 to 700 μg, 1 to 800 μg, 1 to 900 μg, 1 to 1000 μg, 10 to 30 μg, 10 to 40 μg, 10 to 50 μg, 10 to 100 μg, 10 to 200 μg, 10 to 300 μg, 10 to 400 μg, 10 to 500 μg, 10 to 600 μg, 10 to 700 μg, 10 to 800 μg, 10 to 900 μg, 10 to 1000 μg, 100 to 200 μg, 100 to 300 μg, 100 to 400 μg, 100 to 500 μg, 100 to 600 μg, 100 to 700 μg, 100 to 800 μg, 100 to 900 μg, 100 to 1000 μg, 100 to 1250 μg, 100 to 1500 μg, 100 to 1750 μg, 100 to 2000 μg, 100 to 2250 μg, 100 to 2500 μg, 100 to 2750 μg, 100 to 3000 μg, 200 to 300 μg, 200 to 400 μg, 200 to 500 μg, 200 to 600 μg, 200 to 700 μg, 200 to 800 μg, 200 to 900 μg, 200 to 1000 μg, 200 to 1250 μg, 200 to 1500 μg, 200 to 1750 μg, 200 to 2000 μg, 200 to 2250 μg, 200 to 2500 μg, 200 to 2750 μg, 200 to 3000 μg, 300 to 400 μg, 300 to 500 μg, 300 to 600 μg, 300 to 700 μg, 300 to 800 μg, 300 to 900 μg, 300 to 1000 μg, 300 to 1250 μg, 300 to 1500 μg, 300 to 1750 μg, 300 to 2000 μg, 300 to 2250 μg, 300 to 2500 μg, 300 to 2750 μg, 300 to 3000 μg, 400 to 500 μg, 400 to 600 μg, 400 to 700 μg, 400 to 800 μg, 400 to 900 μg, 400 to 1000 μg, 400 to 1250 μg, 400 to 1500 μg, 400 to 1750 μg, 400 to 2000 μg, 400 to 2250 μg, 400 to 2500 μg, 400 to 2750 μg, 400 to 3000 μg, 500 to 600 μg, 500 to 700 μg, 500 to 800 μg, 500 to 900 μg, 500 to 1000 μg, 500 to 1250 μg, 500 to 1500 μg, 500 to 1750 μg, 500 to 2000 μg, 500 to 2250 μg, 500 to 2500 μg, 500 to 2750 μg, 500 to 3000 μg, 600 to 700 μg, 600 to 800 μg, 600 to 900 μg, 600 to 1000 μg, 600 to 1250 μg, 600 to 1500 μg, 600 to 1750 μg, 600 to 2000 μg, 600 to 2250 μg, 600 to 2500 μg, 600 to 2750 μg, 600 to 3000 μg, 700 to 800 μg, 700 to 900 μg, 700 to 1000 μg, 700 to 1250 μg, 700 to 1500 μg, 700 to 1750 μg, 700 to 2000 μg, 700 to 2250 μg, 700 to 2500 μg, 700 to 2750 μg, 700 to 3000 μg, 800 to 900 μg, 800 to 1000 μg, 800 to 1250 μg, 800 to 1500 μg, 800 to 1750 μg, 800 to 2000 μg, 800 to 2250 μg, 800 to 2500 μg, 800 to 2750 μg, 800 to 3000 μg, 900 to 1000 μg, 900 to 1250 μg, 900 to 1500 μg, 900 to 1750 μg, 900 to 2000 μg, 900 to 2250 μg, 900 to 2500 μg, 900 to 2750 μg, 900 to 3000 μg, 1000 to 1250 μg, 1000 to 1500 μg, 1000 to 1750 μg, 1000 to 2000 μg, 1000 to 2250 μg, 1000 to 2500 μg, 1000 to 2750 μg, 1000 to 3000 μg, 2 to 500 μg, 50 to 500 μg, 3 to 10 μg, 5 to 20 μg, 5 to 100 μg, 10 μg, 20 μg, 30 μg, 40 μg, 50 μg, 60 μg, 70 μg, 75 μg, 80 μg, 90 μg, 100 μg, 150 μg, 200 μg, 250 μg, 300 μg, 350 μg, 400 μg, 450 μg, 500 μg, 550 g, 600 μg, 650 μg, 700 μg, 750 μg, 800 μg, 850 μg, 900 μg, 950 μg, 1000 μg, 1050 μg, 1100 μg, 1150 μg, 1200 μg, 1250 μg, 1300 μg, 1350 μg, 1400 μg, 1450 μg, 1500 μg, 1550 μg, 1600 μg, 1650 μg, 1700 μg, 1750 μg, 1800 μg, 1850 μg, 1900 μg, 1950 μg, 2000 μg, 2050 μg, 2100 μg, 2150 μg, 2200 μg, 2250 μg, 2300 μg, 2350 μg, 2400 μg, 2450 μg, 2500 μg, 2550 μg, 2600 μg, 2650 μg, 2700 μg, 2750 μg, 2800 μg, 2850 μg, 2900 μg, 2950 μg, 3000 μg, 3250 μg, 3500 μg, 3750 μg, 4000 μg, 4250 μg, 4500 μg, 4750 μg, 5000 μg of a GCC agonist described herein.

[0618] When provided as a single dosage form, the potential exists for a chemical interaction between the combined active ingredients (for example, an opioid and a GCC agonist). For this reason, the preferred dosage forms of the combination products of this invention are formulated such that although the active ingredients are combined in a single dosage form, the physical contact between the active ingredients is minimized (that is, reduced).

[0619] In order to minimize contact, one embodiment of this invention where the product is orally administered provides for a combination product wherein one active ingredient is enteric coated. By enteric coating one or more of the active ingredients, it is possible not only to minimize the contact between the combined active ingredients, but also, it is possible to control the release of one of these components in the gastrointestinal tract such that one of these components is not released in the stomach but rather is released in the intestines. Another embodiment of this invention where oral administration is desired provides for a combination product wherein one of the active ingredients is coated with a sustained-release material which effects a sustained-release throughout the gastrointestinal tract and also serves to minimize physical contact between the combined active ingredients. Furthermore, the sustained-released component can be additionally enteric coated such that the release of this component occurs only in the intestine. Still another approach would involve the formulation of a combination product in which the one component is coated with a sustained and/or enteric release polymer, and the other component is also coated with a polymer such as a low-viscosity grade of hydroxypropyl methylcellulose (HPMC) or other appropriate materials as known in the art, in order to further separate the active components. The polymer coating serves to form an additional barrier to interaction with the other component.

[0620] Dosage forms of the combination products include those wherein one active ingredient is enteric coated can be in the form of tablets such that the enteric coated component and the other active ingredient are blended together and then compressed into a tablet or such that the enteric coated component is compressed into one tablet layer and the other active ingredient is compressed into an additional layer. Optionally, in order to further separate the two layers, one or more placebo layers may be present such that the placebo layer is between the layers of active ingredients. In addition, dosage forms of the present invention can be in the form of capsules wherein one active ingredient is compressed into a tablet or in the form of a plurality of microtablets, particles, granules or non-perils, which are then enteric coated. These enteric coated microtablets, particles, granules or non-perils are then placed into a capsule or compressed into a capsule along with a granulation of the other active ingredient.

[0621] These as well as other ways of minimizing contact between the components of combination products of the present invention, whether administered in a single dosage form or administered in separate forms but at the same time by the same manner, will be readily apparent to those skilled in the art in light of the present disclosure.

### Peptides as Immunogens

[0622] The peptides of the invention can be used as immunogens to create antibodies for immunoassays. The peptides of the invention that have homology to ST peptides can be used as immunogens to treat and/or prevent one or more disease symptoms associated with traveler's diarrhea and for vaccination against pathogens, including but not limited to enterotoxigenic E. coli (ETEC). They may also be used in vaccines which also comprise interleukin 18 and either saponin adjuvant or CpG adjuvant for example as described in WO05039634 and WO05039630. The methods described in US20040146534, U.S. Pat. No. 4,220,584, U.S. Pat. No. 4,285,391, U.S. Pat. No. 5,182,109, U.S. Pat. No. 4,603,049, U.S. Pat. No. 4,545,931, U.S. Pat. No. 4,886,663, U.S. Pat. No. 4,758,655, WO08402700, FR2525592, and FR2532850 can be similarly used to create immunogens comprising the peptides of the invention. U.S. Pat. No. 6,043,057, U.S. Pat. No. 5,834,246, U.S. Pat. No. 5,268,276, and EP368819, specifically describe an expression system containing CTB (cholera toxin Beta subunit) fused to an ST-like peptide under a foreign promoter for use as a vaccine. The nucleic acids that encode the peptides of the invention may be use as genetic vaccines as described in US20050260605 and WO0148018. The nucleic acid molecules may also be used for the manufacture of a functional ribonucleic acid, wherein the functional ribonucleic acid is selected from the group comprising ribozymes, antisense nucleic acids and siRNA (as described in WO05103073).

1. A method of preventing or treating a side-effect associated with opioid administration, the method comprising administering to a patient that is being treated with an opioid, a polypeptide A′-B′-C′-D′-E′ wherein:
A′ is an amino acid sequence comprising a pre sequence depicted in FIG. 21 or is missing;
B′ is an amino acid sequence comprising a pro sequence depicted in FIG. 21 or is missing;
C′ is an amino acid sequence comprising an N-terminal non-core sequence depicted in FIG. 21 or is missing;
D′ is an amino acid sequence comprising a GC-C receptor agonist polypeptide amino acid sequence; and
E′ is an amino acid sequence comprising a C-terminal non-core sequence depicted in FIG. 21 or is missing;
wherein one or more Asn having the structure: [chemical structure]
is optionally replaced by a group having a structure selected from (a), (b) and (c): [chemical structure]
provided that an Asn at the carboxy terminus is not replaced by structure (a) or structure (c).

2-4. (canceled)

5. A polypeptide or a salt thereof comprising the amino acid sequence:
A′-B′-C′-D′-E′ wherein:
A′ is an amino acid sequence comprising a pre sequence depicted in FIG. 21 or is missing;
B′ is an amino acid sequence comprising a pro sequence depicted in FIG. 21 or is missing;
C′ is an amino acid sequence comprising an N-terminal non-core sequence depicted in FIG. 21 or is missing;
D′ is an amino acid sequence comprising a GC-C receptor agonist polypeptide amino acid sequence; and
E′ is an amino acid sequence comprising a C-terminal non-core sequence depicted in FIG. 21 or is missing;
wherein one or more Asn having the structure: [chemical structure]
is optionally replaced by a group having a structure selected from (a), (b) and (c): [chemical structure]
provided that an Asn at the carboxy terminus is not replaced by structure (a) or structure (c).

6-20. (canceled)

21. The polypeptide of claim 5 wherein D′ comprises a sequence depicted in any of FIGS. 11, 13, 18, 19 and 20.

22. (canceled)

23. The polypeptide of claim 5 comprising an amino acid sequence selected from:

| | |
|---|---|
| Gln Ser Ser Asn Tyr Cys Cys Glu Tyr Cys Cys Asn Pro Ala Cys Thr Gly Cys Tyr | (SEQ ID NO: ---) |
| Asn Thr Ser Asn Tyr Cys Cys Glu Tyr Cys Cys Asn Pro Ala Cys Thr Gly Cys Tyr | (SEQ ID NO: ---) |
| Asn Leu Ser Asn Tyr Cys Cys Glu Tyr Cys Cys Asn Pro Ala Cys Thr Gly Cys Tyr | (SEQ ID NO: ---) |
| Asn Ile Ser Asn Tyr Cys Cys Glu Tyr Cys Cys Asn Pro Ala Cys Thr Gly Cys Tyr | (SEQ ID NO: ---) |
| Asn Ser Ser Gln Tyr Cys Cys Glu Tyr Cys Cys Asn Pro Ala Cys Thr Gly Cys Tyr | (SEQ ID NO: ---) |
| Ser Ser Asn Tyr Cys Cys Glu Tyr Cys Cys Asn Pro Ala Cys Thr Gly Cys Tyr | (SEQ ID NO: ---) |
| Gln Ser Ser Gln Tyr Cys Cys Glu Tyr Cys Cys Asn Pro Ala Cys Thr Gly Cys Tyr | (SEQ ID NO: ---) |
| Ser Ser Gln Tyr Cys Cys Glu Tyr Cys Cys Asn Pro Ala Cys Thr Gly Cys Tyr | (SEQ ID NO: ---) |
| Asn Ser Ser Asn Tyr Cys Cys Glu Ala Cys Cys Asn Pro Ala Cys Thr Gly Cys Tyr | (SEQ ID NO: ) |
| Asn Ser Ser Asn Tyr Cys Cys Glu Arg Cys Cys Asn Pro Ala Cys Thr Gly Cys Tyr | (SEQ ID NO: ) |
| Asn Ser Ser Asn Tyr Cys Cys Glu Asn Cys Cys Asn Pro Ala Cys Thr Gly Cys Tyr | (SEQ ID NO: ) |
| Asn Ser Ser Asn Tyr Cys Cys Glu Asp Cys Cys Asn Pro Ala Cys Thr Gly Cys Tyr | (SEQ ID NO: ) |
| Asn Ser Ser Asn Tyr Cys Cys Glu Cys Cys Cys Asn Pro Ala Cys Thr Gly Cys Tyr | (SEQ ID NO: ) |
| Asn Ser Ser Asn Tyr Cys Cys Glu Gln Cys Cys Asn Pro Ala Cys Thr Gly Cys Tyr | (SEQ ID NO: ) |
| Asn Ser Ser Asn Tyr Cys Cys Glu Glu Cys Cys Asn Pro Ala Cys Thr Gly Cys Tyr | (SEQ ID NO: ) |
| Asn Ser Ser Asn Tyr Cys Cys Glu Gly Cys Cys Asn Pro Ala Cys Thr Gly Cys Tyr | (SEQ ID NO: ) |
| Asn Ser Ser Asn Tyr Cys Cys Glu His Cys Cys Asn Pro Ala Cys Thr Gly Cys Tyr | (SEQ ID NO: ) |
| Asn Ser Ser Asn Tyr Cys Cys Glu Ile Cys Cys Asn Pro Ala Cys Thr Gly Cys Tyr | (SEQ ID NO: ) |
| Asn Ser Ser Asn Tyr Cys Cys Glu Lys Cys Cys Asn Pro Ala Cys Thr Gly Cys Tyr | (SEQ ID NO: ) |
| Asn Ser Ser Asn Tyr Cys Cys Glu Met Cys Cys Asn Pro Ala Cys Thr Gly Cys Tyr | (SEQ ID NO: ) |
| Asn Ser Ser Asn Tyr Cys Cys Glu Phe Cys Cys Asn Pro Ala Cys Thr Gly Cys Tyr | (SEQ ID NO: ) |
| Asn Ser Ser Asn Tyr Cys Cys Glu Pro Cys Cys Asn Pro Ala Cys Thr Gly Cys Tyr | (SEQ ID NO: ) |
| Asn Ser Ser Asn Tyr Cys Cys Glu Ser Cys Cys Asn Pro Ala Cys Thr Gly Cys Tyr | (SEQ ID NO: ) |
| Asn Ser Ser Asn Tyr Cys Cys Glu Thr Cys Cys Asn Pro Ala Cys Thr Gly Cys Tyr | (SEQ ID NO: ) |
| Asn Ser Ser Asn Tyr Cys Cys Glu Trp Cys Cys Asn Pro Ala Cys Thr Gly Cys Tyr | (SEQ ID NO: ) |
| Asn Ser Ser Asn Tyr Cys Cys Glu Val Cys Cys Asn Pro Ala Cys Thr Gly Cys Tyr | (SEQ ID NO: ) |
| Cys Cys Glu Ala Cys Cys Asn Pro Ala Cys Thr Gly Cys Tyr | (SEQ ID NO: ) |
| Cys Cys Glu Arg Cys Cys Asn Pro Ala Cys Thr Gly Cys Tyr | (SEQ ID NO: ) |
| Cys Cys Glu Asn Cys Cys Asn Pro Ala Cys Thr Gly Cys Tyr | (SEQ ID NO: ) |
| Cys Cys Glu Asp Cys Cys Asn Pro Ala Cys Thr Gly Cys Tyr | (SEQ ID NO: ) |
| Cys Cys Glu Cys Cys Cys Asn Pro Ala Cys Thr Gly Cys Tyr | (SEQ ID NO: ) |
| Cys Cys Glu Gln Cys Cys Asn Pro Ala Cys Thr Gly Cys Tyr | (SEQ ID NO: ) |
| Cys Cys Glu Glu Cys Cys Asn Pro Ala Cys Thr Gly Cys Tyr | (SEQ ID NO: ) |
| Cys Cys Glu Gly Cys Cys Asn Pro Ala Cys Thr Gly Cys Tyr | (SEQ ID NO: ) |
| Cys Cys Glu His Cys Cys Asn Pro Ala Cys Thr Gly Cys Tyr | (SEQ ID NO: ) |
| Cys Cys Glu Ile Cys Cys Asn Pro Ala Cys Thr Gly Cys Tyr | (SEQ ID NO: ) |
| Cys Cys Glu Leu Cys Cys Asn Pro Ala Cys Thr Gly Cys Tyr | (SEQ ID NO: ) |
| Cys Cys Glu Lys Cys Cys Asn Pro Ala Cys Thr Gly Cys Tyr | (SEQ ID NO: ) |
| Cys Cys Glu Met Cys Cys Asn Pro Ala Cys Thr Gly Cys Tyr | (SEQ ID NO: ) |
| Cys Cys Glu Phe Cys Cys Asn Pro Ala Cys Thr Gly Cys Tyr | (SEQ ID NO: ) |
| Cys Cys Glu Pro Cys Cys Asn Pro Ala Cys Thr Gly Cys Tyr | (SEQ ID NO: ) |
| Cys Cys Glu Ser Cys Cys Asn Pro Ala Cys Thr Gly Cys Tyr | (SEQ ID NO: ) |
| Cys Cys Glu Thr Cys Cys Asn Pro Ala Cys Thr Gly Cys Tyr | (SEQ ID NO: ) |
| Cys Cys Glu Trp Cys Cys Asn Pro Ala Cys Thr Gly Cys Tyr | (SEQ ID NO: ) |
| Cys Cys Glu Val Cys Cys Asn Pro Ala Cys Thr Gly Cys Tyr | (SEQ ID NO: ) |
| Cys Cys Glu Tyr Cys Cys Asn Pro Ala Cys Thr Gly Cys Tyr | (SEQ ID NO: ) |
| Cys Cys Glu Tyr Cys Cys Asn Pro Ala Cys Thr Gly Cys | (SEQ ID NO: ) |
| Cys Cys Glu Ala Cys Cys Asn Pro Ala Cys Thr Gly Cys | (SEQ ID NO: ) |
| Cys Cys Glu Arg Cys Cys Asn Pro Ala Cys Thr Gly Cys | (SEQ ID NO: ) |
| Cys Cys Glu Asn Cys Cys Asn Pro Ala Cys Thr Gly Cys | (SEQ ID NO: ) |
| Cys Cys Glu Asp Cys Cys Asn Pro Ala Cys Thr Gly Cys | (SEQ ID NO: ) |
| Cys Cys Glu Cys Cys Cys Asn Pro Ala Cys Thr Gly Cys | (SEQ ID NO: ) |
| Cys Cys Glu Gln Cys Cys Asn Pro Ala Cys Thr Gly Cys | (SEQ ID NO: ) |
| Cys Cys Glu Glu Cys Cys Asn Pro Ala Cys Thr Gly Cys | (SEQ ID NO: ) |
| Cys Cys Glu Gly Cys Cys Asn Pro Ala Cys Thr Gly Cys | (SEQ ID NO: ) |
| Cys Cys Glu His Cys Cys Asn Pro Ala Cys Thr Gly Cys | (SEQ ID NO: ) |
| Cys Cys Glu Ile Cys Cys Asn Pro Ala Cys Thr Gly Cys | (SEQ ID NO: ) |
| Cys Cys Glu Leu Cys Cys Asn Pro Ala Cys Thr Gly Cys | (SEQ ID NO: ) |
| Cys Cys Glu Lys Cys Cys Asn Pro Ala Cys Thr Gly Cys | (SEQ ID NO: ) |
| Cys Cys Glu Met Cys Cys Asn Pro Ala Cys Thr Gly Cys | (SEQ ID NO: ) |
| Cys Cys Glu Phe Cys Cys Asn Pro Ala Cys Thr Gly Cys | (SEQ ID NO: ) |
| Cys Cys Glu Pro Cys Cys Asn Pro Ala Cys Thr Gly Cys | (SEQ ID NO: ) |
| Cys Cys Glu Ser Cys Cys Asn Pro Ala Cys Thr Gly Cys | (SEQ ID NO: ) |
| Cys Cys Glu Thr Cys Cys Asn Pro Ala Cys Thr Gly Cys; | (SEQ ID NO: ) |
| Cys Cys Glu Trp Cys Cys Asn Pro Ala Cys Thr Gly Cys | (SEQ ID NO: ) |
| Cys Cys Glu Val Cys Cys Asn Pro Ala Cys Thr Gly Cys. | (SEQ ID NO: ) |
| Cys Cys Glu Leu Cys Cys Ala Pro Ala Cys Thr Gly Cys Tyr | |
| Cys Cys Glu Leu Cys Cys Val Pro Ala Cys Thr Gly Cys Tyr | |
| Cys Cys Glu Leu Cys Cys Leu Pro Ala Cys Thr Gly Cys Tyr | |
| Cys Cys Glu Leu Cys Cys Ile Pro Ala Cys Thr Gly Cys Tyr | |
| Cys Cys Glu Leu Cys Cys Pro Pro Ala Cys Thr Gly Cys Tyr | |
| Cys Cys Glu Leu Cys Cys Met Pro Ala Cys Thr Gly Cys Tyr | |
| Cys Cys Glu Leu Cys Cys Phe Pro Ala Cys Thr Gly Cys Tyr | |
| Cys Cys Glu Leu Cys Cys Trp Pro Ala Cys Thr Gly Cys Tyr | |
| Cys Cys Glu Leu Cys Cys Gly Pro Ala Cys Thr Gly Cys Tyr | |
| Cys Cys Glu Leu Cys Cys Ser Pro Ala Cys Thr Gly Cys Tyr | |
| Cys Cys Glu Leu Cys Cys Thr Pro Ala Cys Thr Gly Cys Tyr | |
| Cys Cys Glu Leu Cys Cys Cys Pro Ala Cys Thr Gly Cys Tyr | |
| Cys Cys Glu Leu Cys Cys Gln Pro Ala Cys Thr Gly Cys Tyr | |
| Cys Cys Glu Leu Cys Cys Tyr Pro Ala Cys Thr Gly Cys Tyr | |
| Cys Cys Glu Leu Cys Cys Asp Pro Ala Cys Thr Gly Cys Tyr | |
| Cys Cys Glu Leu Cys Cys Glu Pro Ala Cys Thr Gly Cys Tyr | |
| Cys Cys Glu Leu Cys Cys Lys Pro Ala Cys Thr Gly Cys Tyr | |
| Cys Cys Glu Leu Cys Cys Arg Pro Ala Cys Thr Gly Cys Tyr | |
| Cys Cys Glu Leu Cys Cys His Pro Ala Cys Thr Gly Cys Tyr | |
| Cys Cys Glu Tyr Cys Cys Ala Pro Ala Cys Thr Gly Cys Tyr | |
| Cys Cys Glu Tyr Cys Cys Val Pro Ala Cys Thr Gly Cys Tyr | |
| Cys Cys Glu Tyr Cys Cys Leu Pro Ala Cys Thr Gly Cys Tyr | |
| Cys Cys Glu Tyr Cys Cys Ile Pro Ala Cys Thr Gly Cys Tyr | |
| Cys Cys Glu Tyr Cys Cys Pro Pro Ala Cys Thr Gly Cys Tyr | |
| Cys Cys Glu Tyr Cys Cys Met Pro Ala Cys Thr Gly Cys Tyr | |
| Cys Cys Glu Tyr Cys Cys Phe Pro Ala Cys Thr Gly Cys Tyr | |
| Cys Cys Glu Tyr Cys Cys Trp Pro Ala Cys Thr Gly Cys Tyr | |
| Cys Cys Glu Tyr Cys Cys Gly Pro Ala Cys Thr Gly Cys Tyr | |
| Cys Cys Glu Tyr Cys Cys Ser Pro Ala Cys Thr Gly Cys Tyr | |
| Cys Cys Glu Tyr Cys Cys Thr Pro Ala Cys Thr Gly Cys Tyr | |
| Cys Cys Glu Tyr Cys Cys Cys Pro Ala Cys Thr Gly Cys Tyr | |
| Cys Cys Glu Tyr Cys Cys Gln Pro Ala Cys Thr Gly Cys Tyr | |
| Cys Cys Glu Tyr Cys Cys Tyr Pro Ala Cys Thr Gly Cys Tyr | |
| Cys Cys Glu Tyr Cys Cys Asp Pro Ala Cys Thr Gly Cys Tyr | |
| Cys Cys Glu Tyr Cys Cys Glu Pro Ala Cys Thr Gly Cys Tyr | |
| Cys Cys Glu Tyr Cys Cys Lys Pro Ala Cys Thr Gly Cys Tyr | |
| Cys Cys Glu Tyr Cys Cys Arg Pro Ala Cys Thr Gly Cys Tyr | |
| Cys Cys Glu Tyr Cys Cys His Pro Ala Cys Thr Gly Cys Tyr | |
| Cys Cys Glu Leu Cys Cys Ala Pro Ala Cys Thr Gly Cys | |
| Cys Cys Glu Leu Cys Cys Val Pro Ala Cys Thr Gly Cys | |
| Cys Cys Glu Leu Cys Cys Leu Pro Ala Cys Thr Gly Cys | |
| Cys Cys Glu Leu Cys Cys Ile Pro Ala Cys Thr Gly Cys | |
| Cys Cys Glu Leu Cys Cys Pro Pro Ala Cys Thr Gly Cys | |
| Cys Cys Glu Leu Cys Cys Met Pro Ala Cys Thr Gly Cys | |
| Cys Cys Glu Leu Cys Cys Phe Pro Ala Cys Thr Gly Cys | |
| Cys Cys Glu Leu Cys Cys Trp Pro Ala Cys Thr Gly Cys | |
| Cys Cys Glu Leu Cys Cys Gly Pro Ala Cys Thr Gly Cys | |
| Cys Cys Glu Leu Cys Cys Ser Pro Ala Cys Thr Gly Cys | |
| Cys Cys Glu Leu Cys Cys Thr Pro Ala Cys Thr Gly Cys | |
| Cys Cys Glu Leu Cys Cys Cys Pro Ala Cys Thr Gly Cys | |
| Cys Cys Glu Leu Cys Cys Gln Pro Ala Cys Thr Gly Cys | |
| Cys Cys Glu Leu Cys Cys Tyr Pro Ala Cys Thr Gly Cys | |
| Cys Cys Glu Leu Cys Cys Asp Pro Ala Cys Thr Gly Cys | |
| Cys Cys Glu Leu Cys Cys Glu Pro Ala Cys Thr Gly Cys | |
| Cys Cys Glu Leu Cys Cys Lys Pro Ala Cys Thr Gly Cys | |
| Cys Cys Glu Leu Cys Cys Arg Pro Ala Cys Thr Gly Cys | |
| Cys Cys Glu Leu Cys Cys His Pro Ala Cys Thr Gly Cys | |
| Cys Cys Glu Tyr Cys Cys Ala Pro Ala Cys Thr Gly Cys | |
| Cys Cys Glu Tyr Cys Cys Val Pro Ala Cys Thr Gly Cys | |
| Cys Cys Glu Tyr Cys Cys Leu Pro Ala Cys Thr Gly Cys | |
| Cys Cys Glu Tyr Cys Cys Ile Pro Ala Cys Thr Gly Cys | |
| Cys Cys Glu Tyr Cys Cys Pro Pro Ala Cys Thr Gly Cys | |
| Cys Cys Glu Tyr Cys Cys Met Pro Ala Cys Thr Gly Cys | |
| Cys Cys Glu Tyr Cys Cys Phe Pro Ala Cys Thr Gly Cys | |
| Cys Cys Glu Tyr Cys Cys Trp Pro Ala Cys Thr Gly Cys | |
| Cys Cys Glu Tyr Cys Cys Gly Pro Ala Cys Thr Gly Cys | |
| Cys Cys Glu Tyr Cys Cys Ser Pro Ala Cys Thr Gly Cys | |
| Cys Cys Glu Tyr Cys Cys Thr Pro Ala Cys Thr Gly Cys | |
| Cys Cys Glu Tyr Cys Cys Cys Pro Ala Cys Thr Gly Cys | |
| Cys Cys Glu Tyr Cys Cys Gln Pro Ala Cys Thr Gly Cys | |
| Cys Cys Glu Tyr Cys Cys Tyr Pro Ala Cys Thr Gly Cys | |
| Cys Cys Glu Tyr Cys Cys Asp Pro Ala Cys Thr Gly Cys | |
| Cys Cys Glu Tyr Cys Cys Glu Pro Ala Cys Thr Gly Cys | |
| Cys Cys Glu Tyr Cys Cys Lys Pro Ala Cys Thr Gly Cys | |
| Cys Cys Glu Tyr Cys Cys Arg Pro Ala Cys Thr Gly Cys | |
| Cys Cys Glu Tyr Cys Cys His Pro Ala Cys Thr Gly Cys | |
| Cys Cys Glu Leu Cys Cys Asn Pro Thr Cys Thr Gly Cys Tyr | |
| Cys Cys Glu Tyr Cys Cys Asn Pro Thr Cys Thr Gly Cys Tyr | |
| Cys Cys Glu Leu Cys Cys Asn Pro Thr Cys Thr Gly Cys | |
| Cys Cys Glu Tyr Cys Cys Asn Pro Thr Cys Thr Gly Cys | |
| Cys Cys Glu Phe Cys Cys Asn Pro Thr Cys Thr Gly Cys Tyr | |
| Cys Cys Glu Phe Cys Cys Asn Pro Thr Cys Thr Gly Cys | |
| Cys Cys Glu Trp Cys Cys Asn Pro Thr Cys Thr Gly Cys Tyr | |
| Cys Cys Glu Trp Cys Cys Asn Pro Thr Cys Thr Gly Cys | |
| Cys Cys Glu Leu Cys Cys Asn Gly Ala Cys Thr Gly Cys Tyr | |
| Cys Cys Glu Tyr Cys Cys Asn Gly Ala Cys Thr Gly Cys Tyr | |
| Cys Cys Glu Leu Cys Cys Asn Gly Ala Cys Thr Gly Cys | |
| Cys Cys Glu Tyr Cys Cys Asn Gly Ala Cys Thr Gly Cys | |
| Cys Cys Glu Phe Cys Cys Asn Gly Ala Cys Thr Gly Cys Tyr | |
| Cys Cys Glu Phe Cys Cys Asn Gly Ala Cys Thr Gly Cys | |
| Cys Cys Glu Trp Cys Cys Asn Gly Ala Cys Thr Gly Cys Tyr | |
| Cys Cys Glu Trp Cys Cys Asn Gly Ala Cys Thr Gly Cys | |
| Cys Cys Glu Leu Cys Cys Asn Pro Ala Cys Val Gly Cys Tyr | |
| Cys Cys Glu Tyr Cys Cys Asn Pro Ala Cys Val Gly Cys Tyr | |
| Cys Cys Glu Leu Cys Cys Asn Pro Ala Cys Val Gly Cys | |
| Cys Cys Glu Tyr Cys Cys Asn Pro Ala Cys Val Gly Cys | |
| Cys Cys Glu Phe Cys Cys Asn Pro Ala Cys Val Gly Cys Tyr | |
| Cys Cys Glu Phe Cys Cys Asn Pro Ala Cys Val Gly Cys | |
| Cys Cys Glu Trp Cys Cys Asn Pro Ala Cys Val Gly Cys Tyr | |
| Cys Cys Glu Trp Cys Cys Asn Pro Ala Cys Val Gly Cys | |
| Cys Cys Glu Leu Cys Cys Asn Pro Ala Cys Gly Gly Cys Tyr | |
| Cys Cys Glu Tyr Cys Cys Asn Pro Ala Cys Gly Gly Cys Tyr | |
| Cys Cys Glu Leu Cys Cys Asn Pro Ala Cys Gly Gly Cys | |
| Cys Cys Glu Tyr Cys Cys Asn Pro Ala Cys Gly Gly Cys | |
| Cys Cys Glu Phe Cys Cys Asn Pro Ala Cys Gly Gly Cys Tyr | |
| Cys Cys Glu Phe Cys Cys Asn Pro Ala Cys Gly Gly Cys | |
| Cys Cys Glu Trp Cys Cys Asn Pro Ala Cys Gly Gly Cys Tyr | |
| Cys Cys Glu Trp Cys Cys Asn Pro Ala Cys Gly Gly Cys | |
| Cys Cys Glu Leu Cys Cys Asn Pro Ala Cys Thr Ala Cys Tyr | |
| Cys Cys Glu Tyr Cys Cys Asn Pro Ala Cys Thr Ala Cys Tyr | |
| Cys Cys Glu Leu Cys Cys Asn Pro Ala Cys Thr Ala Cys | |
| Cys Cys Glu Tyr Cys Cys Asn Pro Ala Cys Thr Ala Cys | |
| Cys Cys Glu Trp Cys Cys Asn Pro Ala Cys Thr Ala Cys Tyr | |
| Cys Cys Glu Trp Cys Cys Asn Pro Ala Cys Thr Ala Cys | |
| Cys Cys Glu Phe Cys Cys Asn Pro Ala Cys Thr Ala Cys Tyr | |
| Cys Cys Glu Phe Cys Cys Asn Pro Ala Cys Thr Ala Cys | |
| Cys Cys Glu Leu Cys Cys Asn Pro Ala Cys Thr Gly Cys Ala | |
| Cys Cys Glu Leu Cys Cys Asn Pro Ala Cys Thr Gly Cys Val | |
| Cys Cys Glu Leu Cys Cys Asn Pro Ala Cys Thr Gly Cys Leu | |
| Cys Cys Glu Leu Cys Cys Asn Pro Ala Cys Thr Gly Cys Ile | |
| Cys Cys Glu Leu Cys Cys Asn Pro Ala Cys Thr Gly Cys Pro | |
| Cys Cys Glu Leu Cys Cys Asn Pro Ala Cys Thr Gly Cys Met | |
| Cys Cys Glu Leu Cys Cys Asn Pro Ala Cys Thr Gly Cys Phe | |
| Cys Cys Glu Leu Cys Cys Asn Pro Ala Cys Thr Gly Cys Trp | |
| Cys Cys Glu Leu Cys Cys Asn Pro Ala Cys Thr Gly Cys Gly | |
| Cys Cys Glu Leu Cys Cys Asn Pro Ala Cys Thr Gly Cys Ser | |
| Cys Cys Glu Leu Cys Cys Asn Pro Ala Cys Thr Gly Cys Thr | |
| Cys Cys Glu Leu Cys Cys Asn Pro Ala Cys Thr Gly Cys Cys | |
| Cys Cys Glu Leu Cys Cys Asn Pro Ala Cys Thr Gly Cys Asn | |
| Cys Cys Glu Leu Cys Cys Asn Pro Ala Cys Thr Gly Cys Gln | |
| Cys Cys Glu Leu Cys Cys Asn Pro Ala Cys Thr Gly Cys Asp | |
| Cys Cys Glu Leu Cys Cys Asn Pro Ala Cys Thr Gly Cys Glu | |
| Cys Cys Glu Leu Cys Cys Asn Pro Ala Cys Thr Gly Cys Lys | |
| Cys Cys Glu Leu Cys Cys Asn Pro Ala Cys Thr Gly Cys Arg | |
| Cys Cys Glu Leu Cys Cys Asn Pro Ala Cys Thr Gly Cys His | |
| Cys Cys Glu Tyr Cys Cys Asn Pro Ala Cys Thr Gly Cys Ala | |
| Cys Cys Glu Tyr Cys Cys Asn Pro Ala Cys Thr Gly Cys Val | |
| Cys Cys Glu Tyr Cys Cys Asn Pro Ala Cys Thr Gly Cys Leu | |
| Cys Cys Glu Tyr Cys Cys Asn Pro Ala Cys Thr Gly Cys Ile | |
| Cys Cys Glu Tyr Cys Cys Asn Pro Ala Cys Thr Gly Cys Pro | |
| Cys Cys Glu Tyr Cys Cys Asn Pro Ala Cys Thr Gly Cys Met | |
| Cys Cys Glu Tyr Cys Cys Asn Pro Ala Cys Thr Gly Cys Phe | |
| Cys Cys Glu Tyr Cys Cys Asn Pro Ala Cys Thr Gly Cys Trp | |
| Cys Cys Glu Tyr Cys Cys Asn Pro Ala Cys Thr Gly Cys Gly | |
| Cys Cys Glu Tyr Cys Cys Asn Pro Ala Cys Thr Gly Cys Ser | |
| Cys Cys Glu Tyr Cys Cys Asn Pro Ala Cys Thr Gly Cys Thr | |
| Cys Cys Glu Tyr Cys Cys Asn Pro Ala Cys Thr Gly Cys Cys | |
| Cys Cys Glu Tyr Cys Cys Asn Pro Ala Cys Thr Gly Cys Asn | |
| Cys Cys Glu Tyr Cys Cys Asn Pro Ala Cys Thr Gly Cys Gln | |
| Cys Cys Glu Tyr Cys Cys Asn Pro Ala Cys Thr Gly Cys Asp | |
| Cys Cys Glu Tyr Cys Cys Asn Pro Ala Cys Thr Gly Cys Glu | |
| Cys Cys Glu Tyr Cys Cys Asn Pro Ala Cys Thr Gly Cys Lys | |
| Cys Cys Glu Tyr Cys Cys Asn Pro Ala Cys Thr Gly Cys Arg | |
| Cys Cys Glu Tyr Cys Cys Asn Pro Ala Cys Thr Gly Cys His | |
| Cys Cys Ala Leu Cys Cys Asn Pro Ala Cys Thr Gly Cys Tyr | |
| Cys Cys Val Leu Cys Cys Asn Pro Ala Cys Thr Gly Cys Tyr | |
| Cys Cys Leu Leu Cys Cys Asn Pro Ala Cys Thr Gly Cys Tyr | |
| Cys Cys Ile Leu Cys Cys Asn Pro Ala Cys Thr Gly Cys Tyr | |
| Cys Cys Met Leu Cys Cys Asn Pro Ala Cys Thr Gly Cys Tyr | |
| Cys Cys Phe Leu Cys Cys Asn Pro Ala Cys Thr Gly Cys Tyr | |
| Cys Cys Trp Leu Cys Cys Asn Pro Ala Cys Thr Gly Cys Tyr | |
| Cys Cys Gly Leu Cys Cys Asn Pro Ala Cys Thr Gly Cys Tyr | |
| Cys Cys Ser Leu Cys Cys Asn Pro Ala Cys Thr Gly Cys Tyr | |
| Cys Cys Thr Leu Cys Cys Asn Pro Ala Cys Thr Gly Cys Tyr | |
| Cys Cys Cys Leu Cys Cys Asn Pro Ala Cys Thr Gly Cys Tyr | |
| Cys Cys Asn Leu Cys Cys Asn Pro Ala Cys Thr Gly Cys Tyr | |
| Cys Cys Gln Leu Cys Cys Asn Pro Ala Cys Thr Gly Cys Tyr | |
| Cys Cys Tyr Leu Cys Cys Asn Pro Ala Cys Thr Gly Cys Tyr | |
| Cys Cys Asp Leu Cys Cys Asn Pro Ala Cys Thr Gly Cys Tyr | |
| Cys Cys Lys Leu Cys Cys Asn Pro Ala Cys Thr Gly Cys Tyr | |
| Cys Cys Arg Leu Cys Cys Asn Pro Ala Cys Thr Gly Cys Tyr | |
| Cys Cys His Leu Cys Cys Asn Pro Ala Cys Thr Gly Cys Tyr | |
| Cys Cys Ala Leu Cys Cys Asn Pro Ala Cys Thr Gly Cys | |
| Cys Cys Val Leu Cys Cys Asn Pro Ala Cys Thr Gly Cys | |
| Cys Cys Leu Leu Cys Cys Asn Pro Ala Cys Thr Gly Cys | |
| Cys Cys Ile Leu Cys Cys Asn Pro Ala Cys Thr Gly Cys | |
| Cys Cys Met Leu Cys Cys Asn Pro Ala Cys Thr Gly Cys | |
| Cys Cys Phe Leu Cys Cys Asn Pro Ala Cys Thr Gly Cys | |
| Cys Cys Trp Leu Cys Cys Asn Pro Ala Cys Thr Gly Cys | |
| Cys Cys Gly Leu Cys Cys Asn Pro Ala Cys Thr Gly Cys | |
| Cys Cys Ser Leu Cys Cys Asn Pro Ala Cys Thr Gly Cys | |
| Cys Cys Thr Leu Cys Cys Asn Pro Ala Cys Thr Gly Cys | |
| Cys Cys Cys Leu Cys Cys Asn Pro Ala Cys Thr Gly Cys | |
| Cys Cys Asn Leu Cys Cys Asn Pro Ala Cys Thr Gly Cys | |
| Cys Cys Gln Leu Cys Cys Asn Pro Ala Cys Thr Gly Cys | |
| Cys Cys Tyr Leu Cys Cys Asn Pro Ala Cys Thr Gly Cys | |
| Cys Cys Asp Leu Cys Cys Asn Pro Ala Cys Thr Gly Cys | |
| Cys Cys Lys Leu Cys Cys Asn Pro Ala Cys Thr Gly Cys | |
| Cys Cys Arg Leu Cys Cys Asn Pro Ala Cys Thr Gly Cys | |
| Cys Cys His Leu Cys Cys Asn Pro Ala Cys Thr Gly Cys | |
| Cys Cys Ala Tyr Cys Cys Asn Pro Ala Cys Thr Gly Cys Tyr | |
| Cys Cys Val Tyr Cys Cys Asn Pro Ala Cys Thr Gly Cys Tyr | |
| Cys Cys Leu Tyr Cys Cys Asn Pro Ala Cys Thr Gly Cys Tyr | |
| Cys Cys Ile Tyr Cys Cys Asn Pro Ala Cys Thr Gly Cys Tyr | |
| Cys Cys Met Tyr Cys Cys Asn Pro Ala Cys Thr Gly Cys Tyr | |
| Cys Cys Phe Tyr Cys Cys Asn Pro Ala Cys Thr Gly Cys Tyr | |
| Cys Cys Trp Tyr Cys Cys Asn Pro Ala Cys Thr Gly Cys Tyr | |
| Cys Cys Gly Tyr Cys Cys Asn Pro Ala Cys Thr Gly Cys Tyr | |
| Cys Cys Ser Tyr Cys Cys Asn Pro Ala Cys Thr Gly Cys Tyr | |
| Cys Cys Thr Tyr Cys Cys Asn Pro Ala Cys Thr Gly Cys Tyr | |
| Cys Cys Cys Tyr Cys Cys Asn Pro Ala Cys Thr Gly Cys Tyr | |
| Cys Cys Asn Tyr Cys Cys Asn Pro Ala Cys Thr Gly Cys Tyr | |
| Cys Cys Gln Tyr Cys Cys Asn Pro Ala Cys Thr Gly Cys Tyr | |
| Cys Cys Tyr Tyr Cys Cys Asn Pro Ala Cys Thr Gly Cys Tyr | |
| Cys Cys Asp Tyr Cys Cys Asn Pro Ala Cys Thr Gly Cys Tyr | |
| Cys Cys Lys Tyr Cys Cys Asn Pro Ala Cys Thr Gly Cys Tyr | |
| Cys Cys Arg Tyr Cys Cys Asn Pro Ala Cys Thr Gly Cys Tyr | |
| Cys Cys His Tyr Cys Cys Asn Pro Ala Cys Thr Gly Cys Tyr | |
| Cys Cys Ala Tyr Cys Cys Asn Pro Ala Cys Thr Gly Cys | |
| Cys Cys Val Tyr Cys Cys Asn Pro Ala Cys Thr Gly Cys | |
| Cys Cys Leu Tyr Cys Cys Asn Pro Ala Cys Thr Gly Cys | |
| Cys Cys Ile Tyr Cys Cys Asn Pro Ala Cys Thr Gly Cys | |
| Cys Cys Met Tyr Cys Cys Asn Pro Ala Cys Thr Gly Cys | |
| Cys Cys Phe Tyr Cys Cys Asn Pro Ala Cys Thr Gly Cys | |
| Cys Cys Trp Tyr Cys Cys Asn Pro Ala Cys Thr Gly Cys | |
| Cys Cys Gly Tyr Cys Cys Asn Pro Ala Cys Thr Gly Cys | |
| Cys Cys Ser Tyr Cys Cys Asn Pro Ala Cys Thr Gly Cys | |
| Cys Cys Thr Tyr Cys Cys Asn Pro Ala Cys Thr Gly Cys | |
| Cys Cys Cys Tyr Cys Cys Asn Pro Ala Cys Thr Gly Cys | |
| Cys Cys Asn Tyr Cys Cys Asn Pro Ala Cys Thr Gly Cys | |
| Cys Cys Gln Tyr Cys Cys Asn Pro Ala Cys Thr Gly Cys | |
| Cys Cys Tyr Tyr Cys Cys Asn Pro Ala Cys Thr Gly Cys | |
| Cys Cys Asp Tyr Cys Cys Asn Pro Ala Cys Thr Gly Cys | |
| Cys Cys Lys Tyr Cys Cys Asn Pro Ala Cys Thr Gly Cys | |
| Cys Cys Arg Tyr Cys Cys Asn Pro Ala Cys Thr Gly Cys | |
| Cys Cys His Tyr Cys Cys Asn Pro Ala Cys Thr Gly Cys | |
| Cys Cys Glu Phe Cys Cys Ala Pro Ala Cys Thr Gly Cys Tyr | |
| Cys Cys Glu Phe Cys Cys Val Pro Ala Cys Thr Gly Cys Tyr | |
| Cys Cys Glu Phe Cys Cys Leu Pro Ala Cys Thr Gly Cys Tyr | |
| Cys Cys Glu Phe Cys Cys Ile Pro Ala Cys Thr Gly Cys Tyr | |
| Cys Cys Glu Phe Cys Cys Pro Pro Ala Cys Thr Gly Cys Tyr | |
| Cys Cys Glu Phe Cys Cys Met Pro Ala Cys Thr Gly Cys Tyr | |
| Cys Cys Glu Phe Cys Cys Phe Pro Ala Cys Thr Gly Cys Tyr | |
| Cys Cys Glu Phe Cys Cys Trp Pro Ala Cys Thr Gly Cys Tyr | |
| Cys Cys Glu Phe Cys Cys Gly Pro Ala Cys Thr Gly Cys Tyr | |
| Cys Cys Glu Phe Cys Cys Ser Pro Ala Cys Thr Gly Cys Tyr | |
| Cys Cys Glu Phe Cys Cys Thr Pro Ala Cys Thr Gly Cys Tyr | |
| Cys Cys Glu Phe Cys Cys Cys Pro Ala Cys Thr Gly Cys Tyr | |
| Cys Cys Glu Phe Cys Cys Gln Pro Ala Cys Thr Gly Cys Tyr | |
| Cys Cys Glu Phe Cys Cys Tyr Pro Ala Cys Thr Gly Cys Tyr | |
| Cys Cys Glu Phe Cys Cys Asp Pro Ala Cys Thr Gly Cys Tyr | |
| Cys Cys Glu Phe Cys Cys Glu Pro Ala Cys Thr Gly Cys Tyr | |
| Cys Cys Glu Phe Cys Cys Lys Pro Ala Cys Thr Gly Cys Tyr | |
| Cys Cys Glu Phe Cys Cys Arg Pro Ala Cys Thr Gly Cys Tyr | |
| Cys Cys Glu Phe Cys Cys His Pro Ala Cys Thr Gly Cys Tyr | |
| Cys Cys Glu Phe Cys Cys Ala Pro Ala Cys Thr Gly Cys | |
| Cys Cys Glu Phe Cys Cys Val Pro Ala Cys Thr Gly Cys | |
| Cys Cys Glu Phe Cys Cys Leu Pro Ala Cys Thr Gly Cys | |
| Cys Cys Glu Phe Cys Cys Ile Pro Ala Cys Thr Gly Cys | |
| Cys Cys Glu Phe Cys Cys Pro Pro Ala Cys Thr Gly Cys | |
| Cys Cys Glu Phe Cys Cys Met Pro Ala Cys Thr Gly Cys | |
| Cys Cys Glu Phe Cys Cys Phe Pro Ala Cys Thr Gly Cys | |
| Cys Cys Glu Phe Cys Cys Trp Pro Ala Cys Thr Gly Cys | |
| Cys Cys Glu Phe Cys Cys Gly Pro Ala Cys Thr Gly Cys | |
| Cys Cys Glu Phe Cys Cys Ser Pro Ala Cys Thr Gly Cys | |
| Cys Cys Glu Phe Cys Cys Thr Pro Ala Cys Thr Gly Cys | |
| Cys Cys Glu Phe Cys Cys Cys Pro Ala Cys Thr Gly Cys | |
| Cys Cys Glu Phe Cys Cys Gln Pro Ala Cys Thr Gly Cys | |
| Cys Cys Glu Phe Cys Cys Tyr Pro Ala Cys Thr Gly Cys | |
| Cys Cys Glu Phe Cys Cys Asp Pro Ala Cys Thr Gly Cys | |
| Cys Cys Glu Phe Cys Cys Glu Pro Ala Cys Thr Gly Cys | |
| Cys Cys Glu Phe Cys Cys Lys Pro Ala Cys Thr Gly Cys | |
| Cys Cys Glu Phe Cys Cys Arg Pro Ala Cys Thr Gly Cys | |
| Cys Cys Glu Phe Cys Cys His Pro Ala Cys Thr Gly Cys | |
| Cys Cys Glu Trp Cys Cys Ala Pro Ala Cys Thr Gly Cys Tyr | |
| Cys Cys Glu Trp Cys Cys Val Pro Ala Cys Thr Gly Cys Tyr | |
| Cys Cys Glu Trp Cys Cys Leu Pro Ala Cys Thr Gly Cys Tyr | |
| Cys Cys Glu Trp Cys Cys Ile Pro Ala Cys Thr Gly Cys Tyr | |
| Cys Cys Glu Trp Cys Cys Pro Pro Ala Cys Thr Gly Cys Tyr | |
| Cys Cys Glu Trp Cys Cys Met Pro Ala Cys Thr Gly Cys Tyr | |
| Cys Cys Glu Trp Cys Cys Phe Pro Ala Cys Thr Gly Cys Tyr | |
| Cys Cys Glu Trp Cys Cys Trp Pro Ala Cys Thr Gly Cys Tyr | |
| Cys Cys Glu Trp Cys Cys Gly Pro Ala Cys Thr Gly Cys Tyr | |
| Cys Cys Glu Trp Cys Cys Ser Pro Ala Cys Thr Gly Cys Tyr | |
| Cys Cys Glu Trp Cys Cys Thr Pro Ala Cys Thr Gly Cys Tyr | |
| Cys Cys Glu Trp Cys Cys Cys Pro Ala Cys Thr Gly Cys Tyr | |
| Cys Cys Glu Trp Cys Cys Gln Pro Ala Cys Thr Gly Cys Tyr | |
| Cys Cys Glu Trp Cys Cys Tyr Pro Ala Cys Thr Gly Cys Tyr | |
| Cys Cys Glu Trp Cys Cys Asp Pro Ala Cys Thr Gly Cys Tyr | |
| Cys Cys Glu Trp Cys Cys Glu Pro Ala Cys Thr Gly Cys Tyr | |
| Cys Cys Glu Trp Cys Cys Lys Pro Ala Cys Thr Gly Cys Tyr | |
| Cys Cys Glu Trp Cys Cys Arg Pro Ala Cys Thr Gly Cys Tyr | |
| Cys Cys Glu Trp Cys Cys His Pro Ala Cys Thr Gly Cys Tyr | |
| Cys Cys Glu Trp Cys Cys Ala Pro Ala Cys Thr Gly Cys | |
| Cys Cys Glu Trp Cys Cys Val Pro Ala Cys Thr Gly Cys | |
| Cys Cys Glu Trp Cys Cys Leu Pro Ala Cys Thr Gly Cys | |
| Cys Cys Glu Trp Cys Cys Ile Pro Ala Cys Thr Gly Cys | |
| Cys Cys Glu Trp Cys Cys Pro Pro Ala Cys Thr Gly Cys | |
| Cys Cys Glu Trp Cys Cys Met Pro Ala Cys Thr Gly Cys | |
| Cys Cys Glu Trp Cys Cys Phe Pro Ala Cys Thr Gly Cys | |
| Cys Cys Glu Trp Cys Cys Trp Pro Ala Cys Thr Gly Cys | |
| Cys Cys Glu Trp Cys Cys Gly Pro Ala Cys Thr Gly Cys | |
| Cys Cys Glu Trp Cys Cys Ser Pro Ala Cys Thr Gly Cys | |
| Cys Cys Glu Trp Cys Cys Thr Pro Ala Cys Thr Gly Cys | |
| Cys Cys Glu Trp Cys Cys Cys Pro Ala Cys Thr Gly Cys | |
| Cys Cys Glu Trp Cys Cys Gln Pro Ala Cys Thr Gly Cys | |
| Cys Cys Glu Trp Cys Cys Tyr Pro Ala Cys Thr Gly Cys | |
| Cys Cys Glu Trp Cys Cys Asp Pro Ala Cys Thr Gly Cys | |
| Cys Cys Glu Trp Cys Cys Glu Pro Ala Cys Thr Gly Cys | |
| Cys Cys Glu Trp Cys Cys Lys Pro Ala Cys Thr Gly Cys | |
| Cys Cys Glu Trp Cys Cys Arg Pro Ala Cys Thr Gly Cys | |
| Cys Cys Glu Trp Cys Cys His Pro Ala Cys Thr Gly Cys | |
| Cys Cys Glu Trp Cys Cys Asn Pro Ala Cys Thr Gly Cys Ala | |
| Cys Cys Glu Trp Cys Cys Asn Pro Ala Cys Thr Gly Cys Val | |
| Cys Cys Glu Trp Cys Cys Asn Pro Ala Cys Thr Gly Cys Leu | |
| Cys Cys Glu Trp Cys Cys Asn Pro Ala Cys Thr Gly Cys Ile | |
| Cys Cys Glu Trp Cys Cys Asn Pro Ala Cys Thr Gly Cys Pro | |
| Cys Cys Glu Trp Cys Cys Asn Pro Ala Cys Thr Gly Cys Met | |
| Cys Cys Glu Trp Cys Cys Asn Pro Ala Cys Thr Gly Cys Phe | |
| Cys Cys Glu Trp Cys Cys Asn Pro Ala Cys Thr Gly Cys Trp | |
| Cys Cys Glu Trp Cys Cys Asn Pro Ala Cys Thr Gly Cys Gly | |
| Cys Cys Glu Trp Cys Cys Asn Pro Ala Cys Thr Gly Cys Ser | |
| Cys Cys Glu Trp Cys Cys Asn Pro Ala Cys Thr Gly Cys Thr | |
| Cys Cys Glu Trp Cys Cys Asn Pro Ala Cys Thr Gly Cys Cys | |
| Cys Cys Glu Trp Cys Cys Asn Pro Ala Cys Thr Gly Cys Asn | |
| Cys Cys Glu Trp Cys Cys Asn Pro Ala Cys Thr Gly Cys Gln | |
| Cys Cys Glu Trp Cys Cys Asn Pro Ala Cys Thr Gly Cys Asp | |
| Cys Cys Glu Trp Cys Cys Asn Pro Ala Cys Thr Gly Cys Glu | |
| Cys Cys Glu Trp Cys Cys Asn Pro Ala Cys Thr Gly Cys Lys | |
| Cys Cys Glu Trp Cys Cys Asn Pro Ala Cys Thr Gly Cys Arg | |
| Cys Cys Glu Trp Cys Cys Asn Pro Ala Cys Thr Gly Cys His | |
| Cys Cys Glu Phe Cys Cys Asn Pro Ala Cys Thr Gly Cys Ala | |
| Cys Cys Glu Phe Cys Cys Asn Pro Ala Cys Thr Gly Cys Val | |
| Cys Cys Glu Phe Cys Cys Asn Pro Ala Cys Thr Gly Cys Leu | |
| Cys Cys Glu Phe Cys Cys Asn Pro Ala Cys Thr Gly Cys Ile | |
| Cys Cys Glu Phe Cys Cys Asn Pro Ala Cys Thr Gly Cys Pro | |
| Cys Cys Glu Phe Cys Cys Asn Pro Ala Cys Thr Gly Cys Met | |
| Cys Cys Glu Phe Cys Cys Asn Pro Ala Cys Thr Gly Cys Phe | |
| Cys Cys Glu Phe Cys Cys Asn Pro Ala Cys Thr Gly Cys Trp | |
| Cys Cys Glu Phe Cys Cys Asn Pro Ala Cys Thr Gly Cys Gly | |
| Cys Cys Glu Phe Cys Cys Asn Pro Ala Cys Thr Gly Cys Ser | |
| Cys Cys Glu Phe Cys Cys Asn Pro Ala Cys Thr Gly Cys Thr | |
| Cys Cys Glu Phe Cys Cys Asn Pro Ala Cys Thr Gly Cys Cys | |
| Cys Cys Glu Phe Cys Cys Asn Pro Ala Cys Thr Gly Cys Asn | |
| Cys Cys Glu Phe Cys Cys Asn Pro Ala Cys Thr Gly Cys Gln | |
| Cys Cys Glu Phe Cys Cys Asn Pro Ala Cys Thr Gly Cys Asp | |
| Cys Cys Glu Phe Cys Cys Asn Pro Ala Cys Thr Gly Cys Glu | |
| Cys Cys Glu Phe Cys Cys Asn Pro Ala Cys Thr Gly Cys Lys | |
| Cys Cys Glu Phe Cys Cys Asn Pro Ala Cys Thr Gly Cys Arg | |
| Cys Cys Glu Phe Cys Cys Asn Pro Ala Cys Thr Gly Cys His | |
| Cys Cys Ala Phe Cys Cys Asn Pro Ala Cys Thr Gly Cys Tyr | |
| Cys Cys Val Phe Cys Cys Asn Pro Ala Cys Thr Gly Cys Tyr | |
| Cys Cys Leu Phe Cys Cys Asn Pro Ala Cys Thr Gly Cys Tyr | |
| Cys Cys Ile Phe Cys Cys Asn Pro Ala Cys Thr Gly Cys Tyr | |
| Cys Cys Met Phe Cys Cys Asn Pro Ala Cys Thr Gly Cys Tyr | |
| Cys Cys Phe Phe Cys Cys Asn Pro Ala Cys Thr Gly Cys Tyr | |
| Cys Cys Trp Phe Cys Cys Asn Pro Ala Cys Thr Gly Cys Tyr | |
| Cys Cys Gly Phe Cys Cys Asn Pro Ala Cys Thr Gly Cys Tyr | |
| Cys Cys Ser Phe Cys Cys Asn Pro Ala Cys Thr Gly Cys Tyr | |
| Cys Cys Thr Phe Cys Cys Asn Pro Ala Cys Thr Gly Cys Tyr | |
| Cys Cys Cys Phe Cys Cys Asn Pro Ala Cys Thr Gly Cys Tyr | |
| Cys Cys Asn Phe Cys Cys Asn Pro Ala Cys Thr Gly Cys Tyr | |
| Cys Cys Gln Phe Cys Cys Asn Pro Ala Cys Thr Gly Cys Tyr | |
| Cys Cys Tyr Phe Cys Cys Asn Pro Ala Cys Thr Gly Cys Tyr | |
| Cys Cys Asp Phe Cys Cys Asn Pro Ala Cys Thr Gly Cys Tyr | |
| Cys Cys Lys Phe Cys Cys Asn Pro Ala Cys Thr Gly Cys Tyr | |
| Cys Cys Arg Phe Cys Cys Asn Pro Ala Cys Thr Gly Cys Tyr | |
| Cys Cys His Phe Cys Cys Asn Pro Ala Cys Thr Gly Cys Tyr | |
| Cys Cys Ala Phe Cys Cys Asn Pro Ala Cys Thr Gly Cys | |
| Cys Cys Val Phe Cys Cys Asn Pro Ala Cys Thr Gly Cys | |
| Cys Cys Leu Phe Cys Cys Asn Pro Ala Cys Thr Gly Cys | |
| Cys Cys Ile Phe Cys Cys Asn Pro Ala Cys Thr Gly Cys | |
| Cys Cys Met Phe Cys Cys Asn Pro Ala Cys Thr Gly Cys | |
| Cys Cys Phe Phe Cys Cys Asn Pro Ala Cys Thr Gly Cys | |
| Cys Cys Trp Phe Cys Cys Asn Pro Ala Cys Thr Gly Cys | |
| Cys Cys Gly Phe Cys Cys Asn Pro Ala Cys Thr Gly Cys | |
| Cys Cys Ser Phe Cys Cys Asn Pro Ala Cys Thr Gly Cys | |
| Cys Cys Thr Phe Cys Cys Asn Pro Ala Cys Thr Gly Cys | |
| Cys Cys Cys Phe Cys Cys Asn Pro Ala Cys Thr Gly Cys | |
| Cys Cys Asn Phe Cys Cys Asn Pro Ala Cys Thr Gly Cys | |
| Cys Cys Gln Phe Cys Cys Asn Pro Ala Cys Thr Gly Cys | |
| Cys Cys Tyr Phe Cys Cys Asn Pro Ala Cys Thr Gly Cys | |
| Cys Cys Asp Phe Cys Cys Asn Pro Ala Cys Thr Gly Cys | |
| Cys Cys Lys Phe Cys Cys Asn Pro Ala Cys Thr Gly Cys | |
| Cys Cys Arg Phe Cys Cys Asn Pro Ala Cys Thr Gly Cys | |
| Cys Cys His Phe Cys Cys Asn Pro Ala Cys Thr Gly Cys | |
| Cys Cys Ala Trp Cys Cys Asn Pro Ala Cys Thr Gly Cys Tyr | |
| Cys Cys Val Trp Cys Cys Asn Pro Ala Cys Thr Gly Cys Tyr | |
| Cys Cys Leu Trp Cys Cys Asn Pro Ala Cys Thr Gly Cys Tyr | |
| Cys Cys Ile Trp Cys Cys Asn Pro Ala Cys Thr Gly Cys Tyr | |
| Cys Cys Met Trp Cys Cys Asn Pro Ala Cys Thr Gly Cys Tyr | |
| Cys Cys Phe Trp Cys Cys Asn Pro Ala Cys Thr Gly Cys Tyr | |
| Cys Cys Trp Trp Cys Cys Asn Pro Ala Cys Thr Gly Cys Tyr | |
| Cys Cys Gly Trp Cys Cys Asn Pro Ala Cys Thr Gly Cys Tyr | |
| Cys Cys Ser Trp Cys Cys Asn Pro Ala Cys Thr Gly Cys Tyr | |
| Cys Cys Thr Trp Cys Cys Asn Pro Ala Cys Thr Gly Cys Tyr | |
| Cys Cys Cys Trp Cys Cys Asn Pro Ala Cys Thr Gly Cys Tyr | |
| Cys Cys Asn Trp Cys Cys Asn Pro Ala Cys Thr Gly Cys Tyr | |
| Cys Cys Gln Trp Cys Cys Asn Pro Ala Cys Thr Gly Cys Tyr | |
| Cys Cys Tyr Trp Cys Cys Asn Pro Ala Cys Thr Gly Cys Tyr | |
| Cys Cys Asp Trp Cys Cys Asn Pro Ala Cys Thr Gly Cys Tyr | |
| Cys Cys Lys Trp Cys Cys Asn Pro Ala Cys Thr Gly Cys Tyr | |
| Cys Cys Arg Trp Cys Cys Asn Pro Ala Cys Thr Gly Cys Tyr | |
| Cys Cys His Trp Cys Cys Asn Pro Ala Cys Thr Gly Cys Tyr | |
| Cys Cys Ala Trp Cys Cys Asn Pro Ala Cys Thr Gly Cys | |
| Cys Cys Val Trp Cys Cys Asn Pro Ala Cys Thr Gly Cys | |
| Cys Cys Leu Trp Cys Cys Asn Pro Ala Cys Thr Gly Cys | |
| Cys Cys Ile Trp Cys Cys Asn Pro Ala Cys Thr Gly Cys | |
| Cys Cys Met Trp Cys Cys Asn Pro Ala Cys Thr Gly Cys | |
| Cys Cys Phe Trp Cys Cys Asn Pro Ala Cys Thr Gly Cys | |
| Cys Cys Trp Trp Cys Cys Asn Pro Ala Cys Thr Gly Cys | |
| Cys Cys Gly Trp Cys Cys Asn Pro Ala Cys Thr Gly Cys | |
| Cys Cys Ser Trp Cys Cys Asn Pro Ala Cys Thr Gly Cys | |
| Cys Cys Thr Trp Cys Cys Asn Pro Ala Cys Thr Gly Cys | |
| Cys Cys Cys Trp Cys Cys Asn Pro Ala Cys Thr Gly Cys | |
| Cys Cys Asn Trp Cys Cys Asn Pro Ala Cys Thr Gly Cys | |
| Cys Cys Gln Trp Cys Cys Asn Pro Ala Cys Thr Gly Cys | |
| Cys Cys Tyr Trp Cys Cys Asn Pro Ala Cys Thr Gly Cys | |
| Cys Cys Asp Trp Cys Cys Asn Pro Ala Cys Thr Gly Cys | |
| Cys Cys Lys Trp Cys Cys Asn Pro Ala Cys Thr Gly Cys | |
| Cys Cys Arg Trp Cys Cys Asn Pro Ala Cys Thr Gly Cys | |
| Cys Cys His Trp Cys Cys Asn Pro Ala Cys Thr Gly Cys | |
| Cys Glu Leu Cys Ile Asn Val Ala Cys Thr Gly Cys | |
| Cys Glu Leu Cys Val Asn Val Ala Cys Thr Gly Cys | |
| Cys Ala Glu Leu Cys Cys Asn Pro Ala Cys | |
| Cys Cys Gly Leu Cys Cys Asn Pro Ala Cys Ala Gly Cys | |
| Cys Cys Gly Leu Cys Cys Tyr Pro Ala Cys Ala Gly Cys | |
| Cys Glu Leu Cys Cys Asn Pro Ala Cys Ala Gly Cys | |
| Cys Cys Asp Val Cys Cys Tyr Pro Ala Cys Thr Gly Cys | |
| Cys Cys Glu Leu Cys Cys Asn Pro Ala Cys Ala Gly Cys | |
| Cys Cys Glu Leu Cys Cys Tyr Pro Ala Cys Ala Gly Cys | |
| Cys Cys Glu Leu Cys Cys Asn Pro Ala Cys Thr Gly Cys | |
| Cys Cys Glu Leu Cys Cys Tyr Pro Ala Cys Thr Gly Cys | |
| Cys Cys Glu Leu Cys Cys Asn Pro Gly Cys Thr Gly Cys | |
| Cys Cys Glu Ala Cys Cys Asn Pro Ala Cys Thr Gly Cys | |
| Cys Cys Glu Lys Cys Cys Asn Pro Ala Cys Thr Gly Cys | |
| Cys Cys Glu Leu Cys Cys Asn Pro Ala Cys Thr Ala Cys | |
| Cys Cys Pro Leu Cys Cys Asn Pro Ala Cys Thr Gly Cys | |
| Ala Cys Glu Leu Cys Ala Asn Pro Ala Cys Thr Gly Cys | |
| Cys Cys Glu Leu Ala Cys Asn Pro Ala Cys Thr Gly Ala | |
| Cys Glu Leu Cys Ala Asn Pro Ala Cys Thr Gly Cys | |
| Cys Cys Glu Leu Ala Cys Asn Pro Ala Cys | |
| Cys Cys Asp Val Cys Cys Asn Pro Ala Cys Ala Gly Cys | |
| Cys Cys Asp Val Cys Cys Asn Pro Ala Cys Thr Gly Cys | |
| Cys Cys Asp Val Cys Cys Asn Pro Ala Cys Ala Gly Cys Tyr | |
| Cys Cys Asp Val Cys Cys Asn Pro Ala Cys Thr Gly Cys Tyr | |
| Cys Cys Glu Leu Cys Cys Tyr Pro Ala Cys Ala Gly Cys | |
| Cys Cys Ile Cys Cys Asn Pro Ala Cys Phe Gly Cys | |
| Cys Cys Asn Tyr Cys Cys Ser Pro Cys Gly Cys | |
| Cys Cys Asp Val Cys Cys Asn Pro Ala Cys Ala Gly Cys | (SEQ ID NO. ) |
| Cys Cys Asp Ala Cys Cys Asn Pro Ala Cys Ala Gly Cys | (SEQ ID NO. ) |
| Cys Cys Asp Cys Cys Cys Asn Pro Ala Cys Ala Gly Cys | (SEQ ID NO. ) |
| Cys Cys Asp Asp Cys Cys Asn Pro Ala Cys Ala Gly Cys | (SEQ ID NO. ) |
| Cys Cys Asp Glu Cys Cys Asn Pro Ala Cys Ala Gly Cys | (SEQ ID NO. ) |
| Cys Cys Asp Phe Cys Cys Asn Pro Ala Cys Ala Gly Cys | (SEQ ID NO. ) |
| Cys Cys Asp Gly Cys Cys Asn Pro Ala Cys Ala Gly Cys | (SEQ ID NO. ) |
| Cys Cys Asp His Cys Cys Asn Pro Ala Cys Ala Gly Cys | (SEQ ID NO. ) |
| Cys Cys Asp Ile Cys Cys Asn Pro Ala Cys Ala Gly Cys | (SEQ ID NO. ) |
| Cys Cys Asp Lys Cys Cys Asn Pro Ala Cys Ala Gly Cys | (SEQ ID NO. ) |
| Cys Cys Asp Leu Cys Cys Asn Pro Ala Cys Ala Gly Cys | (SEQ ID NO. ) |
| Cys Cys Asp Met Cys Cys Asn Pro Ala Cys Ala Gly Cys | (SEQ ID NO. ) |
| Cys Cys Asp Asn Cys Cys Asn Pro Ala Cys Ala Gly Cys | (SEQ ID NO. ) |
| Cys Cys Asp Pro Cys Cys Asn Pro Ala Cys Ala Gly Cys | (SEQ ID NO. ) |
| Cys Cys Asp Gln Cys Cys Asn Pro Ala Cys Ala Gly Cys | (SEQ ID NO. ) |
| Cys Cys Asp Arg Cys Cys Asn Pro Ala Cys Ala Gly Cys | (SEQ ID NO. ) |
| Cys Cys Asp Ser Cys Cys Asn Pro Ala Cys Ala Gly Cys | (SEQ ID NO. ) |
| Cys Cys Asp Thr Cys Cys Asn Pro Ala Cys Ala Gly Cys | (SEQ ID NO. ) |
| Cys Cys Asp Trp Cys Cys Asn Pro Ala Cys Ala Gly Cys | (SEQ ID NO. ) |
| Cys Cys Asp Tyr Cys Cys Asn Pro Ala Cys Ala Gly Cys | (SEQ ID NO. ) |
| Cys Cys Glu Ile Cys Cys Asn Pro Ala Cys Phe Gly Cys | (SEQ ID NO. ) |
| Cys Cys Glu Ala Cys Cys Asn Pro Ala Cys Phe Gly Cys | (SEQ ID NO. ) |
| Cys Cys Glu Cys Cys Cys Asn Pro Ala Cys Phe Gly Cys | (SEQ ID NO. ) |
| Cys Cys Glu Asp Cys Cys Asn Pro Ala Cys Phe Gly Cys | (SEQ ID NO. ) |
| Cys Cys Glu Glu Cys Cys Asn Pro Ala Cys Phe Gly Cys | (SEQ ID NO. ) |
| Cys Cys Glu Phe Cys Cys Asn Pro Ala Cys Phe Gly Cys | (SEQ ID NO. ) |
| Cys Cys Glu Gly Cys Cys Asn Pro Ala Cys Phe Gly Cys | (SEQ ID NO. ) |
| Cys Cys Glu His Cys Cys Asn Pro Ala Cys Phe Gly Cys | (SEQ ID NO. ) |
| Cys Cys Glu Lys Cys Cys Asn Pro Ala Cys Phe Gly Cys | (SEQ ID NO. ) |
| Cys Cys Glu Leu Cys Cys Asn Pro Ala Cys Phe Gly Cys | (SEQ ID NO. ) |
| Cys Cys Glu Met Cys Cys Asn Pro Ala Cys Phe Gly Cys | (SEQ ID NO. ) |
| Cys Cys Glu Asn Cys Cys Asn Pro Ala Cys Phe Gly Cys | (SEQ ID NO. ) |
| Cys Cys Glu Pro Cys Cys Asn Pro Ala Cys Phe Gly Cys | (SEQ ID NO. ) |
| Cys Cys Glu Gln Cys Cys Asn Pro Ala Cys Phe Gly Cys | (SEQ ID NO. ) |
| Cys Cys Glu Arg Cys Cys Asn Pro Ala Cys Phe Gly Cys | (SEQ ID NO. ) |
| Cys Cys Glu Ser Cys Cys Asn Pro Ala Cys Phe Gly Cys | (SEQ ID NO. ) |
| Cys Cys Glu Thr Cys Cys Asn Pro Ala Cys Phe Gly Cys | (SEQ ID NO. ) |
| Cys Cys Glu Val Cys Cys Asn Pro Ala Cys Phe Gly Cys | (SEQ ID NO. ) |
| Cys Cys Glu Trp Cys Cys Asn Pro Ala Cys Phe Gly Cys | (SEQ ID NO. ) |
| Cys Cys Glu Tyr Cys Cys Asn Pro Ala Cys Phe Gly Cys | (SEQ ID NO. ) |
| Cys Cys Glu Leu Cys Cys Asn Pro Ala Cys Ala Pro Cys | (SEQ ID NO. ) |
| Cys Cys Glu Ala Cys Cys Asn Pro Ala Cys Ala Pro Cys | (SEQ ID NO. ) |
| Cys Cys Glu Cys Cys Cys Asn Pro Ala Cys Ala Pro Cys | (SEQ ID NO. ) |
| Cys Cys Glu Asp Cys Cys Asn Pro Ala Cys Ala Pro Cys | (SEQ ID NO. ) |
| Cys Cys Glu Glu Cys Cys Asn Pro Ala Cys Ala Pro Cys | (SEQ ID NO. ) |
| Cys Cys Glu Phe Cys Cys Asn Pro Ala Cys Ala Pro Cys | (SEQ ID NO. ) |
| Cys Cys Glu Gly Cys Cys Asn Pro Ala Cys Ala Pro Cys | (SEQ ID NO. ) |
| Cys Cys Glu His Cys Cys Asn Pro Ala Cys Ala Pro Cys | (SEQ ID NO. ) |
| Cys Cys Glu Ile Cys Cys Asn Pro Ala Cys Ala Pro Cys | (SEQ ID NO. ) |
| Cys Cys Glu Lys Cys Cys Asn Pro Ala Cys Ala Pro Cys | (SEQ ID NO. ) |
| Cys Cys Glu Met Cys Cys Asn Pro Ala Cys Ala Pro Cys | (SEQ ID NO. ) |
| Cys Cys Glu Asn Cys Cys Asn Pro Ala Cys Ala Pro Cys | (SEQ ID NO. ) |
| Cys Cys Glu Pro Cys Cys Asn Pro Ala Cys Ala Pro Cys | (SEQ ID NO. ) |
| Cys Cys Glu Gln Cys Cys Asn Pro Ala Cys Ala Pro Cys | (SEQ ID NO. ) |
| Cys Cys Glu Arg Cys Cys Asn Pro Ala Cys Ala Pro Cys | (SEQ ID NO. ) |
| Cys Cys Glu Ser Cys Cys Asn Pro Ala Cys Ala Pro Cys | (SEQ ID NO. ) |
| Cys Cys Glu Thr Cys Cys Asn Pro Ala Cys Ala Pro Cys | (SEQ ID NO. ) |
| Cys Cys Glu Val Cys Cys Asn Pro Ala Cys Ala Pro Cys | (SEQ ID NO. ) |
| Cys Cys Glu Trp Cys Cys Asn Pro Ala Cys Ala Pro Cys | (SEQ ID NO. ) |
| Cys Cys Glu Tyr Cys Cys Asn Pro Ala Cys Ala Pro Cys | (SEQ ID NO. ) |
| Cys Cys Glu Leu Cys Cys Asn Pro Ala Cys Phe Gly Cys | (SEQ ID NO. ) |
| Cys Cys Glu Ala Cys Cys Asn Pro Ala Cys Phe Gly Cys | (SEQ ID NO. ) |
| Cys Cys Glu Cys Cys Cys Asn Pro Ala Cys Phe Gly Cys | (SEQ ID NO. ) |
| Cys Cys Glu Asp Cys Cys Asn Pro Ala Cys Phe Gly Cys | (SEQ ID NO. ) |
| Cys Cys Glu Glu Cys Cys Asn Pro Ala Cys Phe Gly Cys | (SEQ ID NO. ) |
| Cys Cys Glu Phe Cys Cys Asn Pro Ala Cys Phe Gly Cys | (SEQ ID NO. ) |
| Cys Cys Glu Gly Cys Cys Asn Pro Ala Cys Phe Gly Cys | (SEQ ID NO. ) |
| Cys Cys Glu His Cys Cys Asn Pro Ala Cys Phe Gly Cys | (SEQ ID NO. ) |
| Cys Cys Glu Ile Cys Cys Asn Pro Ala Cys Phe Gly Cys | (SEQ ID NO. ) |
| Cys Cys Glu Lys Cys Cys Asn Pro Ala Cys Phe Gly Cys | (SEQ ID NO. ) |
| Cys Cys Glu Met Cys Cys Asn Pro Ala Cys Phe Gly Cys | (SEQ ID NO. ) |
| Cys Cys Glu Asn Cys Cys Asn Pro Ala Cys Phe Gly Cys | (SEQ ID NO. ) |
| Cys Cys Glu Pro Cys Cys Asn Pro Ala Cys Phe Gly Cys | (SEQ ID NO. ) |
| Cys Cys Glu Gln Cys Cys Asn Pro Ala Cys Phe Gly Cys | (SEQ ID NO. ) |
| Cys Cys Glu Arg Cys Cys Asn Pro Ala Cys Phe Gly Cys | (SEQ ID NO. ) |
| Cys Cys Glu Ser Cys Cys Asn Pro Ala Cys Phe Gly Cys | (SEQ ID NO. ) |
| Cys Cys Glu Thr Cys Cys Asn Pro Ala Cys Phe Gly Cys | (SEQ ID NO. ) |
| Cys Cys Glu Val Cys Cys Asn Pro Ala Cys Phe Gly Cys | (SEQ ID NO. ) |
| Cys Cys Glu Trp Cys Cys Asn Pro Ala Cys Phe Gly Cys | (SEQ ID NO. ) |
| Cys Cys Glu Tyr Cys Cys Asn Pro Ala Cys Phe Gly Cys | (SEQ ID NO. ) |
| Cys Cys Glu Val Cys Cys Asn Pro Ala Cys Ala Gly Cys | (SEQ ID NO. ) |
| Cys Cys Glu Ala Cys Cys Asn Pro Ala Cys Ala Gly Cys | (SEQ ID NO. ) |
| Cys Cys Glu Cys Cys Cys Asn Pro Ala Cys Ala Gly Cys | (SEQ ID NO. ) |
| Cys Cys Glu Asp Cys Cys Asn Pro Ala Cys Ala Gly Cys | (SEQ ID NO. ) |
| Cys Cys Glu Glu Cys Cys Asn Pro Ala Cys Ala Gly Cys | (SEQ ID NO. ) |
| Cys Cys Glu Phe Cys Cys Asn Pro Ala Cys Ala Gly Cys | (SEQ ID NO. ) |
| Cys Cys Glu Gly Cys Cys Asn Pro Ala Cys Ala Gly Cys | (SEQ ID NO. ) |
| Cys Cys Glu His Cys Cys Asn Pro Ala Cys Ala Gly Cys | (SEQ ID NO. ) |
| Cys Cys Glu Ile Cys Cys Asn Pro Ala Cys Ala Gly Cys | (SEQ ID NO. ) |
| Cys Cys Glu Lys Cys Cys Asn Pro Ala Cys Ala Gly Cys | (SEQ ID NO. ) |
| Cys Cys Glu Leu Cys Cys Asn Pro Ala Cys Ala Gly Cys | (SEQ ID NO. ) |
| Cys Cys Glu Met Cys Cys Asn Pro Ala Cys Ala Gly Cys | (SEQ ID NO. ) |
| Cys Cys Glu Asn Cys Cys Asn Pro Ala Cys Ala Gly Cys | (SEQ ID NO. ) |
| Cys Cys Glu Pro Cys Cys Asn Pro Ala Cys Ala Gly Cys | (SEQ ID NO. ) |
| Cys Cys Glu Gln Cys Cys Asn Pro Ala Cys Ala Gly Cys | (SEQ ID NO. ) |
| Cys Cys Glu Arg Cys Cys Asn Pro Ala Cys Ala Gly Cys | (SEQ ID NO. ) |
| Cys Cys Glu Ser Cys Cys Asn Pro Ala Cys Ala Gly Cys | (SEQ ID NO. ) |
| Cys Cys Glu Thr Cys Cys Asn Pro Ala Cys Ala Gly Cys | (SEQ ID NO. ) |
| Cys Cys Glu Trp Cys Cys Asn Pro Ala Cys Ala Gly Cys | (SEQ ID NO. ) |
| and | |
| Cys Cys Glu Tyr Cys Cys Asn Pro Ala Cys Ala Gly Cys | (SEQ ID NO. ) |

wherein one or more Asn is optionally replaced by a group having a structure selected from (a), (b) and (c).

24. The polypeptide of any of claim 5, wherein D′ comprises an amino acid sequence selected from:
Cys Cys Glu Ala Cys Cys Asn Pro Ala Cys Thr Gly
Cys
Cys Cys Glu Arg Cys Cys Asn Pro Ala Cys Thr Gly
Cys
Cys Cys Glu Asn Cys Cys Asn Pro Ala Cys Thr Gly
Cys
Cys Cys Glu Asp Cys Cys Asn Pro Ala Cys Thr Gly
Cys
Cys Cys Glu Cys Cys Cys Asn Pro Ala Cys Thr Gly
Cys
Cys Cys Glu Gln Cys Cys Asn Pro Ala Cys Thr Gly
Cys
Cys Cys Glu Glu Cys Cys Asn Pro Ala Cys Thr Gly
Cys
Cys Cys Glu Gly Cys Cys Asn Pro Ala Cys Thr Gly
Cys
Cys Cys Glu His Cys Cys Asn Pro Ala Cys Thr Gly
Cys
Cys Cys Glu Ile Cys Cys Asn Pro Ala Cys Thr Gly
Cys
Cys Cys Glu Lys Cys Cys Asn Pro Ala Cys Thr Gly
Cys
Cys Cys Glu Met Cys Cys Asn Pro Ala Cys Thr Gly
Cys
Cys Cys Glu Phe Cys Cys Asn Pro Ala Cys Thr Gly
Cys
Cys Cys Glu Pro Cys Cys Asn Pro Ala Cys Thr Gly
Cys
Cys Cys Glu Ser Cys Cys Asn Pro Ala Cys Thr Gly
Cys
Cys Cys Glu Thr Cys Cys Asn Pro Ala Cys Thr Gly
Cys
Cys Cys Glu Trp Cys Cys Asn Pro Ala Cys Thr Gly
Cys
Cys Cys Glu Val Cys Cys Asn Pro Ala Cys Thr Gly
Cys
Cys Cys Glu Tyr Cys Cys Asn Pro Ala Cys Thr Gly
Cys
Cys Cys Glu Leu Cys Cys Asn Pro Ala Cys Thr Gly
Cys
Cys Cys Glu Ala Cys Cys Asn Pro Ala Cys Thr Gly
Cys Tyr
Cys Cys Glu Arg Cys Cys Asn Pro Ala Cys Thr Gly
Cys Tyr
Cys Cys Glu Asn Cys Cys Asn Pro Ala Cys Thr Gly
Cys Tyr
Cys Cys Glu Asp Cys Cys Asn Pro Ala Cys Thr Gly
Cys Tyr
Cys Cys Glu Cys Cys Cys Asn Pro Ala Cys Thr Gly
Cys Tyr
Cys Cys Glu Gln Cys Cys Asn Pro Ala Cys Thr Gly
Cys Tyr
Cys Cys Glu Glu Cys Cys Asn Pro Ala Cys Thr Gly
Cys Tyr
Cys Cys Glu Gly Cys Cys Asn Pro Ala Cys Thr Gly
Cys Tyr
Cys Cys Glu His Cys Cys Asn Pro Ala Cys Thr Gly
Cys Tyr
Cys Cys Glu Ile Cys Cys Asn Pro Ala Cys Thr Gly
Cys Tyr
Cys Cys Glu Lys Cys Cys Asn Pro Ala Cys Thr Gly
Cys Tyr
Cys Cys Glu Met Cys Cys Asn Pro Ala Cys Thr Gly
Cys Tyr
Cys Cys Glu Phe Cys Cys Asn Pro Ala Cys Thr Gly
Cys Tyr
Cys Cys Glu Pro Cys Cys Asn Pro Ala Cys Thr Gly
Cys Tyr
Cys Cys Glu Ser Cys Cys Asn Pro Ala Cys Thr Gly
Cys Tyr
Cys Cys Glu Thr Cys Cys Asn Pro Ala Cys Thr Gly
Cys Tyr
Cys Cys Glu Trp Cys Cys Asn Pro Ala Cys Thr Gly
Cys Tyr
Cys Cys Glu Val Cys Cys Asn Pro Ala Cys Thr Gly
Cys Tyr
Cys Cys Glu Tyr Cys Cys Asn Pro Ala Cys Thr Gly
Cys Tyr
Cys Cys Glu Leu Cys Cys Asn Pro Ala Cys Thr Gly
Cys Tyr
wherein one or more Asn is optionally replaced by a group having a structure selected from (a), (b) and (c).

25-63. (canceled)

64. The polypeptide of claim 5 wherein D′ comprises an amino acid sequence selected from:
CCELCCNPACTGCY;
CCEYCCNPACTGCY;
CCEFCCNPACTGCY;
CCEWCCNPACTGCY;
CCELCCNPACTGC;
CCEYCCNPACTGC;
CCEFCCNPACTGC;
and
CCEWCCNPACTGC,
wherein one or more Asn is optionally replaced by a group having a structure selected from (a), (b) and (c).

65-78. (canceled)

79. A pharmaceutical composition comprising a polypeptide claim 5.

80. A method of treating a gastrointestinal disorder comprising administering the pharmaceutical composition of claim 79.

81. The method of claim 80 wherein the gastrointestinal disorder is selected from: a gastrointestinal motility disorder, chronic intestinal pseudo-obstruction, colonic pseudo-obstruction, Crohn's disease, duodenogastric reflux, dyspepsia, functional dyspepsia, nonulcer dyspepsia, a functional gastrointestinal disorder, functional heartburn, gastroesophageal reflux disease (GERD), gastroparesis, irritable bowel syndrome, post-operative ileus, inflammatory bowel disorder, ulcerative colitis, constipation, chronic constipation, chronic idiopathic constipation.

82-95. (canceled)

96. A method for decreasing gastrointestinal pain or visceral pain comprising administering the pharmaceutical composition of claim 79.

97-107. (canceled)

108. A method of treating pain or preventing pain comprising administering an opioid and a CCC receptor agonist.

109-127. (canceled)

128. A pharmaceutical composition comprising an opioid and a GCC receptor agonist.

129-139. (canceled)

140. A purified polypeptide or salt thereof comprising the amino acid sequence:
A′-B′-C′-D′-E′ wherein:
A′ is an amino acid sequence comprising a pre sequence depicted in FIG. 21 or is missing;
B′ is an amino acid sequence comprising a pro sequence depicted in FIG. 21 or is missing;
C′ is an amino acid sequence comprising an N-terminal non-core sequence depicted in FIG. 21 or is missing;
D′ is an amino acid sequence comprising a GC-C receptor agonist polypeptide amino acid sequence; and
E′ is an amino acid sequence comprising a C-terminal non-core sequence depicted in FIG. 21.

141. The purified polypeptide of claim 140 wherein D′ comprises an amino acid sequence selected from:

| | |
|---|---|
| Gln Ser Ser Asn Tyr Cys Cys Glu Tyr Cys Cys Asn Pro Ala Cys Thr Gly Cys Tyr | (SEQ ID NO: ---) |
| Asn Thr Ser Asn Tyr Cys Cys Glu Tyr Cys Cys Asn Pro Ala Cys Thr Gly Cys Tyr | (SEQ ID NO: ---) |
| Asn Leu Ser Asn Tyr Cys Cys Glu Tyr Cys Cys Asn Pro Ala Cys Thr Gly Cys Tyr | (SEQ ID NO: ---) |
| Asn Ile Ser Asn Tyr Cys Cys Glu Tyr Cys Cys Asn Pro Ala Cys Thr Gly Cys Tyr | (SEQ ID NO: ---) |
| Asn Ser Ser Gln Tyr Cys Cys Glu Tyr Cys Cys Asn Pro Ala Cys Thr Gly Cys Tyr | (SEQ ID NO: ---) |
| Ser Ser Asn Tyr Cys Cys Glu Tyr Cys Cys Asn Pro Ala Cys Thr Gly Cys Tyr | (SEQ ID NO: ---) |
| Gln Ser Ser Gln Tyr Cys Cys Glu Tyr Cys Cys Asn Pro Ala Cys Thr Gly Cys Tyr | (SEQ ID NO: ---) |
| Ser Ser Gln Tyr Cys Cys Glu Tyr Cys Cys Asn Pro Ala Cys Thr Gly Cys Tyr | (SEQ ID NO: ---) |
| Asn Ser Ser Asn Tyr Cys Cys Glu Ala Cys Cys Asn Pro Ala Cys Thr Gly Cys Tyr | (SEQ ID NO: ) |
| Asn Ser Ser Asn Tyr Cys Cys Glu Arg Cys Cys Asn Pro Ala Cys Thr Gly Cys Tyr | (SEQ ID NO: ) |
| Asn Ser Ser Asn Tyr Cys Cys Glu Asn Cys Cys Asn Pro Ala Cys Thr Gly Cys Tyr | (SEQ ID NO: ) |
| Asn Ser Ser Asn Tyr Cys Cys Glu Asp Cys Cys Asn Pro Ala Cys Thr Gly Cys Tyr | (SEQ ID NO: ) |
| Asn Ser Ser Asn Tyr Cys Cys Glu Cys Cys Cys Asn Pro Ala Cys Thr Gly Cys Tyr | (SEQ ID NO: ) |
| Asn Ser Ser Asn Tyr Cys Cys Glu Gln Cys Cys Asn Pro Ala Cys Thr Gly Cys Tyr | (SEQ ID NO: ) |
| Asn Ser Ser Asn Tyr Cys Cys Glu Glu Cys Cys Asn Pro Ala Cys Thr Gly Cys Tyr | (SEQ ID NO: ) |
| Asn Ser Ser Asn Tyr Cys Cys Glu Gly Cys Cys Asn Pro Ala Cys Thr Gly Cys Tyr | (SEQ ID NO: ) |
| Asn Ser Ser Asn Tyr Cys Cys Glu His Cys Cys Asn Pro Ala Cys Thr Gly Cys Tyr | (SEQ ID NO: ) |
| Asn Ser Ser Asn Tyr Cys Cys Glu Ile Cys Cys Asn Pro Ala Cys Thr Gly Cys Tyr | (SEQ ID NO: ) |
| Asn Ser Ser Asn Tyr Cys Cys Glu Lys Cys Cys Asn Pro Ala Cys Thr Gly Cys Tyr | (SEQ ID NO: ) |
| Asn Ser Ser Asn Tyr Cys Cys Glu Met Cys Cys Asn Pro Ala Cys Thr Gly Cys Tyr | (SEQ ID NO: ) |
| Asn Ser Ser Asn Tyr Cys Cys Glu Phe Cys Cys Asn Pro Ala Cys Thr Gly Cys Tyr | (SEQ ID NO: ) |
| Asn Ser Ser Asn Tyr Cys Cys Glu Pro Cys Cys Asn Pro Ala Cys Thr Gly Cys Tyr | (SEQ ID NO: ) |
| Asn Ser Ser Asn Tyr Cys Cys Glu Ser Cys Cys Asn Pro Ala Cys Thr Gly Cys Tyr | (SEQ ID NO: ) |
| Asn Ser Ser Asn Tyr Cys Cys Glu Thr Cys Cys Asn Pro Ala Cys Thr Gly Cys Tyr | (SEQ ID NO: ) |
| Asn Ser Ser Asn Tyr Cys Cys Glu Trp Cys Cys Asn Pro Ala Cys Thr Gly Cys Tyr | (SEQ ID NO: ) |
| Asn Ser Ser Asn Tyr Cys Cys Glu Val Cys Cys Asn Pro Ala Cys Thr Gly Cys Tyr | (SEQ ID NO: ) |
| Cys Cys Glu Ala Cys Cys Asn Pro Ala Cys Thr Gly Cys Tyr | (SEQ ID NO: ) |
| Cys Cys Glu Arg Cys Cys Asn Pro Ala Cys Thr Gly Cys Tyr | (SEQ ID NO: ) |
| Cys Cys Glu Asn Cys Cys Asn Pro Ala Cys Thr Gly Cys Tyr | (SEQ ID NO: ) |
| Cys Cys Gln Asp Cys Cys Asn Pro Ala Cys Thr Gly Cys Tyr | (SEQ ID NO: ) |
| Cys Cys Glu Cys Cys Cys Asn Pro Ala Cys Thr Gly Cys Tyr | (SEQ ID NO: ) |
| Cys Cys Glu Gln Cys Cys Asn Pro Ala Cys Thr Gly Cys Tyr | (SEQ ID NO: ) |
| Cys Cys Glu Glu Cys Cys Asn Pro Ala Cys Thr Gly Cys Tyr | (SEQ ID NO: ) |
| Cys Cys Glu Gly Cys Cys Asn Pro Ala Cys Thr Gly Cys Tyr | (SEQ ID NO: ) |
| Cys Cys Glu His Cys Cys Asn Pro Ala Cys Thr Gly Cys Tyr | (SEQ ID NO: ) |
| Cys Cys Glu Ile Cys Cys Asn Pro Ala Cys Thr Gly Cys Tyr | (SEQ ID NO: ) |
| Cys Cys Glu Lys Cys Cys Asn Pro Ala Cys Thr Gly Cys Tyr | (SEQ ID NO: ) |
| Cys Cys Glu Met Cys Cys Asn Pro Ala Cys Thr Gly Cys Tyr | (SEQ ID NO: ) |
| Cys Cys Glu Phe Cys Cys Asn Pro Ala Cys Thr Gly Cys Tyr | (SEQ ID NO: ) |
| Cys Cys Glu Pro Cys Cys Asn Pro Ala Cys Thr Gly Cys Tyr | (SEQ ID NO: ) |
| Cys Cys Glu Ser Cys Cys Asn Pro Ala Cys Thr Gly Cys Tyr | (SEQ ID NO: ) |
| Cys Cys Glu Thr Cys Cys Asn Pro Ala Cys Thr Gly Cys Tyr | (SEQ ID NO: ) |
| Cys Cys Glu Trp Cys Cys Asn Pro Ala Cys Thr Gly Cys Tyr | (SEQ ID NO: ) |
| Cys Cys Glu Val Cys Cys Asn Pro Ala Cys Thr Gly Cys Tyr | (SEQ ID NO: ) |
| Cys Cys Glu Tyr Cys Cys Asn Pro Ala Cys Thr Gly Cys | (SEQ ID NO: 6) |
| Cys Cys Glu Ala Cys Cys Asn Pro Ala Cys Thr Gly Cys | (SEQ ID NO: ) |
| Cys Cys Glu Arg Cys Cys Asn Pro Ala Cys Thr Gly Cys | (SEQ ID NO: ) |
| Cys Cys Glu Asn Cys Cys Asn Pro Ala Cys Thr Gly Cys | (SEQ ID NO: ) |
| Cys Cys Glu Asp Cys Cys Asn Pro Ala Cys Thr Gly Cys | (SEQ ID NO: ) |
| Cys Cys Glu Cys Cys Cys Asn Pro Ala Cys Thr Gly Cys | (SEQ ID NO: ) |
| Cys Cys Glu Gln Cys Cys Asn Pro Ala Cys Thr Gly Cys | (SEQ ID NO: ) |
| Cys Cys Glu Glu Cys Cys Asn Pro Ala Cys Thr Gly Cys | (SEQ ID NO: ) |
| Cys Cys Glu Gly Cys Cys Asn Pro Ala Cys Thr Gly Cys | (SEQ ID NO: ) |
| Cys Cys Glu His Cys Cys Asn Pro Ala Cys Thr Gly Cys | (SEQ ID NO: ) |
| Cys Cys Glu Ile Cys Cys Asn Pro Ala Cys Thr Gly Cys | (SEQ ID NO: ) |
| Cys Cys Glu Lys Cys Cys Asn Pro Ala Cys Thr Gly Cys | (SEQ ID NO: ) |
| Cys Cys Glu Met Cys Cys Asn Pro Ala Cys Thr Gly Cys | (SEQ ID NO: ) |
| Cys Cys Glu Phe Cys Cys Asn Pro Ala Cys Thr Gly Cys | (SEQ ID NO: ) |
| Cys Cys Glu Pro Cys Cys Asn Pro Ala Cys Thr Gly Cys | (SEQ ID NO: ) |
| Cys Cys Glu Ser Cys Cys Asn Pro Ala Cys Thr Gly Cys | (SEQ ID NO: ) |
| Cys Cys Glu Thr Cys Cys Asn Pro Ala Cys Thr Gly Cys; | (SEQ ID NO: ) |
| Cys Cys Glu Trp Cys Cys Asn Pro Ala Cys Thr Gly Cys | (SEQ ID NO: ) |
| Cys Cys Glu Val Cys Cys Asn Pro Ala Cys Thr Gly Cys. | (SEQ ID NO: ) |
| Cys Cys Glu Leu Cys Cys Ala Pro Ala Cys Thr Gly Cys Tyr | |
| Cys Cys Glu Leu Cys Cys Val Pro Ala Cys Thr Gly Cys Tyr | |
| Cys Cys Glu Leu Cys Cys Leu Pro Ala Cys Thr Gly Cys Tyr | |
| Cys Cys Glu Leu Cys Cys Ile Pro Ala Cys Thr Gly Cys Tyr | |
| Cys Cys Glu Leu Cys Cys Pro Pro Ala Cys Thr Gly Cys Tyr | |
| Cys Cys Glu Leu Cys Cys Met Pro Ala Cys Thr Gly Cys Tyr | |
| Cys Cys Glu Leu Cys Cys Phe Pro Ala Cys Thr Gly Cys Tyr | |
| Cys Cys Glu Leu Cys Cys Trp Pro Ala Cys Thr Gly Cys Tyr | |
| Cys Cys Glu Leu Cys Cys Gly Pro Ala Cys Thr Gly Cys Tyr | |
| Cys Cys Glu Leu Cys Cys Ser Pro Ala Cys Thr Gly Cys Tyr | |
| Cys Cys Glu Leu Cys Cys Thr Pro Ala Cys Thr Gly Cys Tyr | |
| Cys Cys Glu Leu Cys Cys Cys Pro Ala Cys Thr Gly Cys Tyr | |
| Cys Cys Glu Leu Cys Cys Gln Pro Ala Cys Thr Gly Cys Tyr | |
| Cys Cys Glu Leu Cys Cys Tyr Pro Ala Cys Thr Gly Cys Tyr | |
| Cys Cys Glu Leu Cys Cys Asp Pro Ala Cys Thr Gly Cys Tyr | |
| Cys Cys Glu Leu Cys Cys Glu Pro Ala Cys Thr Gly Cys Tyr | |
| Cys Cys Glu Leu Cys Cys Lys Pro Ala Cys Thr Gly Cys Tyr | |
| Cys Cys Glu Leu Cys Cys Arg Pro Ala Cys Thr Gly Cys Tyr | |
| Cys Cys Glu Leu Cys Cys His Pro Ala Cys Thr Gly Cys Tyr | |
| Cys Cys Glu Tyr Cys Cys Ala Pro Ala Cys Thr Gly Cys Tyr | |
| Cys Cys Glu Tyr Cys Cys Val Pro Ala Cys Thr Gly Cys Tyr | |
| Cys Cys Glu Tyr Cys Cys Leu Pro Ala Cys Thr Gly Cys Tyr | |
| Cys Cys Glu Tyr Cys Cys Ile Pro Ala Cys Thr Gly Cys Tyr | |
| Cys Cys Glu Tyr Cys Cys Pro Pro Ala Cys Thr Gly Cys Tyr | |
| Cys Cys Glu Tyr Cys Cys Met Pro Ala Cys Thr Gly Cys Tyr | |
| Cys Cys Glu Tyr Cys Cys Phe Pro Ala Cys Thr Gly Cys Tyr | |
| Cys Cys Glu Tyr Cys Cys Trp Pro Ala Cys Thr Gly Cys Tyr | |
| Cys Cys Glu Tyr Cys Cys Gly Pro Ala Cys Thr Gly Cys Tyr | |
| Cys Cys Glu Tyr Cys Cys Ser Pro Ala Cys Thr Gly Cys Tyr | |
| Cys Cys Glu Tyr Cys Cys Thr Pro Ala Cys Thr Gly Cys Tyr | |
| Cys Cys Glu Tyr Cys Cys Cys Pro Ala Cys Thr Gly Cys Tyr | |
| Cys Cys Glu Tyr Cys Cys Gln Pro Ala Cys Thr Gly Cys Tyr | |
| Cys Cys Glu Tyr Cys Cys Tyr Pro Ala Cys Thr Gly Cys Tyr | |
| Cys Cys Glu Tyr Cys Cys Asp Pro Ala Cys Thr Gly Cys Tyr | |
| Cys Cys Glu Tyr Cys Cys Glu Pro Ala Cys Thr Gly Cys Tyr | |
| Cys Cys Glu Tyr Cys Cys Lys Pro Ala Cys Thr Gly Cys Tyr | |
| Cys Cys Glu Tyr Cys Cys Arg Pro Ala Cys Thr Gly Cys Tyr | |
| Cys Cys Glu Tyr Cys Cys His Pro Ala Cys Thr Gly Cys Tyr | |
| Cys Cys Glu Leu Cys Cys Ala Pro Ala Cys Thr Gly Cys | |
| Cys Cys Glu Leu Cys Cys Val Pro Ala Cys Thr Gly Cys | |
| Cys Cys Glu Leu Cys Cys Leu Pro Ala Cys Thr Gly Cys | |
| Cys Cys Glu Leu Cys Cys Ile Pro Ala Cys Thr Gly Cys | |
| Cys Cys Glu Leu Cys Cys Pro Pro Ala Cys Thr Gly Cys | |
| Cys Cys Glu Leu Cys Cys Met Pro Ala Cys Thr Gly Cys | |
| Cys Cys Glu Leu Cys Cys Phe Pro Ala Cys Thr Gly Cys | |
| Cys Cys Glu Leu Cys Cys Trp Pro Ala Cys Thr Gly Cys | |
| Cys Cys Glu Leu Cys Cys Gly Pro Ala Cys Thr Gly Cys | |
| Cys Cys Glu Leu Cys Cys Ser Pro Ala Cys Thr Gly Cys | |
| Cys Cys Glu Leu Cys Cys Thr Pro Ala Cys Thr Gly Cys | |
| Cys Cys Glu Leu Cys Cys Cys Pro Ala Cys Thr Gly Cys | |
| Cys Cys Glu Leu Cys Cys Gln Pro Ala Cys Thr Gly Cys | |
| Cys Cys Glu Leu Cys Cys Tyr Pro Ala Cys Thr Gly Cys | |
| Cys Cys Glu Leu Cys Cys Asp Pro Ala Cys Thr Gly Cys | |
| Cys Cys Glu Leu Cys Cys Glu Pro Ala Cys Thr Gly Cys | |
| Cys Cys Glu Leu Cys Cys Lys Pro Ala Cys Thr Gly Cys | |
| Cys Cys Glu Leu Cys Cys Arg Pro Ala Cys Thr Gly Cys | |
| Cys Cys Glu Leu Cys Cys His Pro Ala Cys Thr Gly Cys | |
| Cys Cys Glu Tyr Cys Cys Ala Pro Ala Cys Thr Gly Cys | |
| Cys Cys Glu Tyr Cys Cys Val Pro Ala Cys Thr Gly Cys | |
| Cys Cys Glu Tyr Cys Cys Leu Pro Ala Cys Thr Gly Cys | |
| Cys Cys Glu Tyr Cys Cys Ile Pro Ala Cys Thr Gly Cys | |
| Cys Cys Glu Tyr Cys Cys Pro Pro Ala Cys Thr Gly Cys | |
| Cys Cys Glu Tyr Cys Cys Met Pro Ala Cys Thr Gly Cys | |
| Cys Cys Glu Tyr Cys Cys Phe Pro Ala Cys Thr Gly Cys | |
| Cys Cys Glu Tyr Cys Cys Trp Pro Ala Cys Thr Gly Cys | |
| Cys Cys Glu Tyr Cys Cys Gly Pro Ala Cys Thr Gly Cys | |
| Cys Cys Glu Tyr Cys Cys Ser Pro Ala Cys Thr Gly Cys | |
| Cys Cys Glu Tyr Cys Cys Thr Pro Ala Cys Thr Gly Cys | |
| Cys Cys Glu Tyr Cys Cys Cys Pro Ala Cys Thr Gly Cys | |
| Cys Cys Glu Tyr Cys Cys Gln Pro Ala Cys Thr Gly Cys | |
| Cys Cys Glu Tyr Cys Cys Tyr Pro Ala Cys Thr Gly Cys | |
| Cys Cys Glu Tyr Cys Cys Asp Pro Ala Cys Thr Gly Cys | |
| Cys Cys Glu Tyr Cys Cys Glu Pro Ala Cys Thr Gly Cys | |
| Cys Cys Glu Tyr Cys Cys Lys Pro Ala Cys Thr Gly Cys | |
| Cys Cys Glu Tyr Cys Cys Arg Pro Ala Cys Thr Gly Cys | |
| Cys Cys Glu Tyr Cys Cys His Pro Ala Cys Thr Gly Cys | |
| Cys Cys Glu Leu Cys Cys Asn Pro Thr Cys Thr Gly Cys Tyr | |
| Cys Cys Glu Tyr Cys Cys Asn Pro Thr Cys Thr Gly Cys Tyr | |
| Cys Cys Glu Leu Cys Cys Asn Pro Thr Cys Thr Gly Cys | |
| Cys Cys Glu Tyr Cys Cys Asn Pro Thr Cys Thr Gly Cys | |
| Cys Cys Glu Phe Cys Cys Asn Pro Thr Cys Thr Gly Cys Tyr | |
| Cys Cys Glu Phe Cys Cys Asn Pro Thr Cys Thr Gly Cys | |
| Cys Cys Glu Trp Cys Cys Asn Pro Thr Cys Thr Gly Cys Tyr | |
| Cys Cys Glu Trp Cys Cys Asn Pro Thr Cys Thr Gly Cys | |
| Cys Cys Glu Leu Cys Cys Asn Gly Ala Cys Thr Gly Cys Tyr | |
| Cys Cys Glu Tyr Cys Cys Asn Gly Ala Cys Thr Gly Cys Tyr | |
| Cys Cys Glu Leu Cys Cys Asn Gly Ala Cys Thr Gly Cys | |
| Cys Cys Glu Tyr Cys Cys Asn Gly Ala Cys Thr Gly Cys | |
| Cys Cys Glu Phe Cys Cys Asn Gly Ala Cys Thr Gly Cys Tyr | |
| Cys Cys Glu Phe Cys Cys Asn Gly Ala Cys Thr Gly Cys | |
| Cys Cys Glu Trp Cys Cys Asn Gly Ala Cys Thr Gly Cys Tyr | |
| Cys Cys Glu Trp Cys Cys Asn Gly Ala Cys Thr Gly Cys | |
| Cys Cys Glu Leu Cys Cys Asn Pro Ala Cys Val Gly Cys Tyr | |
| Cys Cys Glu Tyr Cys Cys Asn Pro Ala Cys Val Gly Cys Tyr | |
| Cys Cys Glu Leu Cys Cys Asn Pro Ala Cys Val Gly Cys | |
| Cys Cys Glu Tyr Cys Cys Asn Pro Ala Cys Val Gly Cys | |
| Cys Cys Glu Phe Cys Cys Asn Pro Ala Cys Val Gly Cys Tyr | |
| Cys Cys Glu Phe Cys Cys Asn Pro Ala Cys Val Gly Cys | |
| Cys Cys Glu Trp Cys Cys Asn Pro Ala Cys Val Gly Cys Tyr | |
| Cys Cys Glu Trp Cys Cys Asn Pro Ala Cys Val Gly Cys | |
| Cys Cys Glu Leu Cys Cys Asn Pro Ala Cys Gly Gly Cys Tyr | |
| Cys Cys Glu Tyr Cys Cys Asn Pro Ala Cys Gly Gly Cys Tyr | |
| Cys Cys Glu Leu Cys Cys Asn Pro Ala Cys Gly Gly Cys | |
| Cys Cys Glu Tyr Cys Cys Asn Pro Ala Cys Gly Gly Cys | |
| Cys Cys Glu Phe Cys Cys Asn Pro Ala Cys Gly Gly Cys Tyr | |
| Cys Cys Glu Phe Cys Cys Asn Pro Ala Cys Gly Gly Cys | |
| Cys Cys Glu Trp Cys Cys Asn Pro Ala Cys Gly Gly Cys Tyr | |
| Cys Cys Glu Trp Cys Cys Asn Pro Ala Cys Gly Gly Cys | |
| Cys Cys Glu Leu Cys Cys Asn Pro Ala Cys Thr Ala Cys Tyr | |
| Cys Cys Glu Tyr Cys Cys Asn Pro Ala Cys Thr Ala Cys Tyr | |
| Cys Cys Glu Leu Cys Cys Asn Pro Ala Cys Thr Ala Cys | |
| Cys Cys Glu Tyr Cys Cys Asn Pro Ala Cys Thr Ala Cys | |
| Cys Cys Glu Trp Cys Cys Asn Pro Ala Cys Thr Ala Cys Tyr | |
| Cys Cys Glu Trp Cys Cys Asn Pro Ala Cys Thr Ala Cys | |
| Cys Cys Glu Phe Cys Cys Asn Pro Ala Cys Thr Ala Cys Tyr | |
| Cys Cys Glu Phe Cys Cys Asn Pro Ala Cys Thr Ala Cys | |
| Cys Cys Glu Leu Cys Cys Asn Pro Ala Cys Thr Gly Cys Ala | |
| Cys Cys Glu Leu Cys Cys Asn Pro Ala Cys Thr Gly Cys Val | |
| Cys Cys Glu Leu Cys Cys Asn Pro Ala Cys Thr Gly Cys Leu | |
| Cys Cys Glu Leu Cys Cys Asn Pro Ala Cys Thr Gly Cys Ile | |
| Cys Cys Glu Leu Cys Cys Asn Pro Ala Cys Thr Gly Cys Pro | |
| Cys Cys Glu Leu Cys Cys Asn Pro Ala Cys Thr Gly Cys Met | |
| Cys Cys Glu Leu Cys Cys Asn Pro Ala Cys Thr Gly Cys Phe | |
| Cys Cys Glu Leu Cys Cys Asn Pro Ala Cys Thr Gly Cys Trp | |
| Cys Cys Glu Leu Cys Cys Asn Pro Ala Cys Thr Gly Cys Gly | |
| Cys Cys Glu Leu Cys Cys Asn Pro Ala Cys Thr Gly Cys Ser | |
| Cys Cys Glu Leu Cys Cys Asn Pro Ala Cys Thr Gly Cys Thr | |
| Cys Cys Glu Leu Cys Cys Asn Pro Ala Cys Thr Gly Cys Cys | |
| Cys Cys Glu Leu Cys Cys Asn Pro Ala Cys Thr Gly Cys Asn | |
| Cys Cys Glu Leu Cys Cys Asn Pro Ala Cys Thr Gly Cys Gln | |
| Cys Cys Glu Leu Cys Cys Asn Pro Ala Cys Thr Gly Cys Asp | |
| Cys Cys Glu Leu Cys Cys Asn Pro Ala Cys Thr Gly Cys Glu | |
| Cys Cys Glu Leu Cys Cys Asn Pro Ala Cys Thr Gly Cys Lys | |
| Cys Cys Glu Leu Cys Cys Asn Pro Ala Cys Thr Gly Cys Arg | |
| Cys Cys Glu Leu Cys Cys Asn Pro Ala Cys Thr Gly Cys His | |
| Cys Cys Glu Tyr Cys Cys Asn Pro Ala Cys Thr Gly Cys Ala | |
| Cys Cys Glu Tyr Cys Cys Asn Pro Ala Cys Thr Gly Cys Val | |
| Cys Cys Glu Tyr Cys Cys Asn Pro Ala Cys Thr Gly Cys Leu | |
| Cys Cys Glu Tyr Cys Cys Asn Pro Ala Cys Thr Gly Cys Ile | |
| Cys Cys Glu Tyr Cys Cys Asn Pro Ala Cys Thr Gly Cys Pro | |
| Cys Cys Glu Tyr Cys Cys Asn Pro Ala Cys Thr Gly Cys Met | |
| Cys Cys Glu Tyr Cys Cys Asn Pro Ala Cys Thr Gly Cys Phe | |
| Cys Cys Glu Tyr Cys Cys Asn Pro Ala Cys Thr Gly Cys Trp | |
| Cys Cys Glu Tyr Cys Cys Asn Pro Ala Cys Thr Gly Cys Gly | |
| Cys Cys Glu Tyr Cys Cys Asn Pro Ala Cys Thr Gly Cys Ser | |
| Cys Cys Glu Tyr Cys Cys Asn Pro Ala Cys Thr Gly Cys Thr | |
| Cys Cys Glu Tyr Cys Cys Asn Pro Ala Cys Thr Gly Cys Cys | |
| Cys Cys Glu Tyr Cys Cys Asn Pro Ala Cys Thr Gly Cys Asn | |
| Cys Cys Glu Tyr Cys Cys Asn Pro Ala Cys Thr Gly Cys Gln | |
| Cys Cys Glu Tyr Cys Cys Asn Pro Ala Cys Thr Gly Cys Asp | |
| Cys Cys Glu Tyr Cys Cys Asn Pro Ala Cys Thr Gly Cys Glu | |
| Cys Cys Glu Tyr Cys Cys Asn Pro Ala Cys Thr Gly Cys Lys | |
| Cys Cys Glu Tyr Cys Cys Asn Pro Ala Cys Thr Gly Cys Arg | |
| Cys Cys Glu Tyr Cys Cys Asn Pro Ala Cys Thr Gly Cys His | |
| Cys Cys Ala Leu Cys Cys Asn Pro Ala Cys Thr Gly Cys Tyr | |
| Cys Cys Val Leu Cys Cys Asn Pro Ala Cys Thr Gly Cys Tyr | |
| Cys Cys Leu Leu Cys Cys Asn Pro Ala Cys Thr Gly Cys Tyr | |
| Cys Cys Ile Leu Cys Cys Asn Pro Ala Cys Thr Gly Cys Tyr | |
| Cys Cys Met Leu Cys Cys Asn Pro Ala Cys Thr Gly Cys Tyr | |
| Cys Cys Phe Leu Cys Cys Asn Pro Ala Cys Thr Gly Cys Tyr | |
| Cys Cys Trp Leu Cys Cys Asn Pro Ala Cys Thr Gly Cys Tyr | |
| Cys Cys Gly Leu Cys Cys Asn Pro Ala Cys Thr Gly Cys Tyr | |
| Cys Cys Ser Leu Cys Cys Asn Pro Ala Cys Thr Gly Cys Tyr | |
| Cys Cys Thr Leu Cys Cys Asn Pro Ala Cys Thr Gly Cys Tyr | |
| Cys Cys Cys Leu Cys Cys Asn Pro Ala Cys Thr Gly Cys Tyr | |
| Cys Cys Asn Leu Cys Cys Asn Pro Ala Cys Thr Gly Cys Tyr | |
| Cys Cys Gln Leu Cys Cys Asn Pro Ala Cys Thr Gly Cys Tyr | |
| Cys Cys Tyr Leu Cys Cys Asn Pro Ala Cys Thr Gly Cys Tyr | |
| Cys Cys Asp Leu Cys Cys Asn Pro Ala Cys Thr Gly Cys Tyr | |
| Cys Cys Lys Leu Cys Cys Asn Pro Ala Cys Thr Gly Cys Tyr | |
| Cys Cys Arg Leu Cys Cys Asn Pro Ala Cys Thr Gly Cys Tyr | |
| Cys Cys His Leu Cys Cys Asn Pro Ala Cys Thr Gly Cys Tyr | |
| Cys Cys Ala Leu Cys Cys Asn Pro Ala Cys Thr Gly Cys | |
| Cys Cys Val Leu Cys Cys Asn Pro Ala Cys Thr Gly Cys | |
| Cys Cys Leu Leu Cys Cys Asn Pro Ala Cys Thr Gly Cys | |
| Cys Cys Ile Leu Cys Cys Asn Pro Ala Cys Thr Gly Cys | |
| Cys Cys Met Leu Cys Cys Asn Pro Ala Cys Thr Gly Cys | |
| Cys Cys Phe Leu Cys Cys Asn Pro Ala Cys Thr Gly Cys | |
| Cys Cys Trp Leu Cys Cys Asn Pro Ala Cys Thr Gly Cys | |
| Cys Cys Gly Leu Cys Cys Asn Pro Ala Cys Thr Gly Cys | |
| Cys Cys Ser Leu Cys Cys Asn Pro Ala Cys Thr Gly Cys | |
| Cys Cys Thr Leu Cys Cys Asn Pro Ala Cys Thr Gly Cys | |
| Cys Cys Cys Leu Cys Cys Asn Pro Ala Cys Thr Gly Cys | |
| Cys Cys Asn Leu Cys Cys Asn Pro Ala Cys Thr Gly Cys | |
| Cys Cys Gln Leu Cys Cys Asn Pro Ala Cys Thr Gly Cys | |
| Cys Cys Tyr Leu Cys Cys Asn Pro Ala Cys Thr Gly Cys | |
| Cys Cys Asp Leu Cys Cys Asn Pro Ala Cys Thr Gly Cys | |
| Cys Cys Lys Leu Cys Cys Asn Pro Ala Cys Thr Gly Cys | |
| Cys Cys Arg Leu Cys Cys Asn Pro Ala Cys Thr Gly Cys | |
| Cys Cys His Leu Cys Cys Asn Pro Ala Cys Thr Gly Cys | |
| Cys Cys Ala Tyr Cys Cys Asn Pro Ala Cys Thr Gly Cys Tyr | |
| Cys Cys Val Tyr Cys Cys Asn Pro Ala Cys Thr Gly Cys Tyr | |
| Cys Cys Leu Tyr Cys Cys Asn Pro Ala Cys Thr Gly Cys Tyr | |
| Cys Cys Ile Tyr Cys Cys Asn Pro Ala Cys Thr Gly Cys Tyr | |
| Cys Cys Met Tyr Cys Cys Asn Pro Ala Cys Thr Gly Cys Tyr | |
| Cys Cys Phe Tyr Cys Cys Asn Pro Ala Cys Thr Gly Cys Tyr | |
| Cys Cys Trp Tyr Cys Cys Asn Pro Ala Cys Thr Gly Cys Tyr | |
| Cys Cys Gly Tyr Cys Cys Asn Pro Ala Cys Thr Gly Cys Tyr | |
| Cys Cys Ser Tyr Cys Cys Asn Pro Ala Cys Thr Gly Cys Tyr | |
| Cys Cys Thr Tyr Cys Cys Asn Pro Ala Cys Thr Gly Cys Tyr | |
| Cys Cys Cys Tyr Cys Cys Asn Pro Ala Cys Thr Gly Cys Tyr | |
| Cys Cys Asn Tyr Cys Cys Asn Pro Ala Cys Thr Gly Cys Tyr | |
| Cys Cys Gln Tyr Cys Cys Asn Pro Ala Cys Thr Gly Cys Tyr | |
| Cys Cys Tyr Tyr Cys Cys Asn Pro Ala Cys Thr Gly Cys Tyr | |
| Cys Cys Asp Tyr Cys Cys Asn Pro Ala Cys Thr Gly Cys Tyr | |
| Cys Cys Lys Tyr Cys Cys Asn Pro Ala Cys Thr Gly Cys Tyr | |
| Cys Cys Arg Tyr Cys Cys Asn Pro Ala Cys Thr Gly Cys Tyr | |
| Cys Cys His Tyr Cys Cys Asn Pro Ala Cys Thr Gly Cys Tyr | |
| Cys Cys Ala Tyr Cys Cys Asn Pro Ala Cys Thr Gly Cys | |
| Cys Cys Val Tyr Cys Cys Asn Pro Ala Cys Thr Gly Cys | |
| Cys Cys Leu Tyr Cys Cys Asn Pro Ala Cys Thr Gly Cys | |
| Cys Cys Ile Tyr Cys Cys Asn Pro Ala Cys Thr Gly Cys | |
| Cys Cys Met Tyr Cys Cys Asn Pro Ala Cys Thr Gly Cys | |
| Cys Cys Phe Tyr Cys Cys Asn Pro Ala Cys Thr Gly Cys | |
| Cys Cys Trp Tyr Cys Cys Asn Pro Ala Cys Thr Gly Cys | |
| Cys Cys Gly Tyr Cys Cys Asn Pro Ala Cys Thr Gly Cys | |
| Cys Cys Ser Tyr Cys Cys Asn Pro Ala Cys Thr Gly Cys | |
| Cys Cys Thr Tyr Cys Cys Asn Pro Ala Cys Thr Gly Cys | |
| Cys Cys Cys Tyr Cys Cys Asn Pro Ala Cys Thr Gly Cys | |
| Cys Cys Asn Tyr Cys Cys Asn Pro Ala Cys Thr Gly Cys | |
| Cys Cys Gln Tyr Cys Cys Asn Pro Ala Cys Thr Gly Cys | |
| Cys Cys Tyr Tyr Cys Cys Asn Pro Ala Cys Thr Gly Cys | |
| Cys Cys Asp Tyr Cys Cys Asn Pro Ala Cys Thr Gly Cys | |
| Cys Cys Lys Tyr Cys Cys Asn Pro Ala Cys Thr Gly Cys | |
| Cys Cys Arg Tyr Cys Cys Asn Pro Ala Cys Thr Gly Cys | |
| Cys Cys His Tyr Cys Cys Asn Pro Ala Cys Thr Gly Cys | |
| Cys Cys Glu Phe Cys Cys Ala Pro Ala Cys Thr Gly Cys Tyr | |
| Cys Cys Glu Phe Cys Cys Val Pro Ala Cys Thr Gly Cys Tyr | |
| Cys Cys Glu Phe Cys Cys Leu Pro Ala Cys Thr Gly Cys Tyr | |
| Cys Cys Glu Phe Cys Cys Ile Pro Ala Cys Thr Gly Cys Tyr | |
| Cys Cys Glu Phe Cys Cys Pro Pro Ala Cys Thr Gly Cys Tyr | |
| Cys Cys Glu Phe Cys Cys Met Pro Ala Cys Thr Gly Cys Tyr | |
| Cys Cys Glu Phe Cys Cys Phe Pro Ala Cys Thr Gly Cys Tyr | |
| Cys Cys Glu Phe Cys Cys Trp Pro Ala Cys Thr Gly Cys Tyr | |
| Cys Cys Glu Phe Cys Cys Gly Pro Ala Cys Thr Gly Cys Tyr | |
| Cys Cys Glu Phe Cys Cys Ser Pro Ala Cys Thr Gly Cys Tyr | |
| Cys Cys Glu Phe Cys Cys Thr Pro Ala Cys Thr Gly Cys Tyr | |
| Cys Cys Glu Phe Cys Cys Cys Pro Ala Cys Thr Gly Cys Tyr | |
| Cys Cys Glu Phe Cys Cys Gln Pro Ala Cys Thr Gly Cys Tyr | |
| Cys Cys Glu Phe Cys Cys Tyr Pro Ala Cys Thr Gly Cys Tyr | |
| Cys Cys Glu Phe Cys Cys Asp Pro Ala Cys Thr Gly Cys Tyr | |
| Cys Cys Glu Phe Cys Cys Glu Pro Ala Cys Thr Gly Cys Tyr | |
| Cys Cys Glu Phe Cys Cys Lys Pro Ala Cys Thr Gly Cys Tyr | |
| Cys Cys Glu Phe Cys Cys Arg Pro Ala Cys Thr Gly Cys Tyr | |
| Cys Cys Glu Phe Cys Cys His Pro Ala Cys Thr Gly Cys Tyr | |
| Cys Cys Glu Phe Cys Cys Ala Pro Ala Cys Thr Gly Cys | |
| Cys Cys Glu Phe Cys Cys Val Pro Ala Cys Thr Gly Cys | |
| Cys Cys Glu Phe Cys Cys Leu Pro Ala Cys Thr Gly Cys | |
| Cys Cys Glu Phe Cys Cys Ile Pro Ala Cys Thr Gly Cys | |
| Cys Cys Glu Phe Cys Cys Pro Pro Ala Cys Thr Gly Cys | |
| Cys Cys Glu Phe Cys Cys Met Pro Ala Cys Thr Gly Cys | |
| Cys Cys Glu Phe Cys Cys Phe Pro Ala Cys Thr Gly Cys | |
| Cys Cys Glu Phe Cys Cys Trp Pro Ala Cys Thr Gly Cys | |
| Cys Cys Glu Phe Cys Cys Gly Pro Ala Cys Thr Gly Cys | |
| Cys Cys Glu Phe Cys Cys Ser Pro Ala Cys Thr Gly Cys | |
| Cys Cys Glu Phe Cys Cys Thr Pro Ala Cys Thr Gly Cys | |
| Cys Cys Glu Phe Cys Cys Cys Pro Ala Cys Thr Gly Cys | |
| Cys Cys Glu Phe Cys Cys Gln Pro Ala Cys Thr Gly Cys | |
| Cys Cys Glu Phe Cys Cys Tyr Pro Ala Cys Thr Gly Cys | |
| Cys Cys Glu Phe Cys Cys Asp Pro Ala Cys Thr Gly Cys | |
| Cys Cys Glu Phe Cys Cys Glu Pro Ala Cys Thr Gly Cys | |
| Cys Cys Glu Phe Cys Cys Lys Pro Ala Cys Thr Gly Cys | |
| Cys Cys Glu Phe Cys Cys Arg Pro Ala Cys Thr Gly Cys | |
| Cys Cys Glu Phe Cys Cys His Pro Ala Cys Thr Gly Cys | |
| Cys Cys Glu Trp Cys Cys Ala Pro Ala Cys Thr Gly Cys Tyr | |
| Cys Cys Glu Trp Cys Cys Val Pro Ala Cys Thr Gly Cys Tyr | |
| Cys Cys Glu Trp Cys Cys Leu Pro Ala Cys Thr Gly Cys Tyr | |
| Cys Cys Glu Trp Cys Cys Ile Pro Ala Cys Thr Gly Cys Tyr | |
| Cys Cys Glu Trp Cys Cys Pro Pro Ala Cys Thr Gly Cys Tyr | |
| Cys Cys Glu Trp Cys Cys Met Pro Ala Cys Thr Gly Cys Tyr | |
| Cys Cys Glu Trp Cys Cys Phe Pro Ala Cys Thr Gly Cys Tyr | |
| Cys Cys Glu Trp Cys Cys Trp Pro Ala Cys Thr Gly Cys Tyr | |
| Cys Cys Glu Trp Cys Cys Gly Pro Ala Cys Thr Gly Cys Tyr | |
| Cys Cys Glu Trp Cys Cys Ser Pro Ala Cys Thr Gly Cys Tyr | |
| Cys Cys Glu Trp Cys Cys Thr Pro Ala Cys Thr Gly Cys Tyr | |
| Cys Cys Glu Trp Cys Cys Cys Pro Ala Cys Thr Gly Cys Tyr | |
| Cys Cys Glu Trp Cys Cys Gln Pro Ala Cys Thr Gly Cys Tyr | |
| Cys Cys Glu Trp Cys Cys Tyr Pro Ala Cys Thr Gly Cys Tyr | |
| Cys Cys Glu Trp Cys Cys Asp Pro Ala Cys Thr Gly Cys Tyr | |
| Cys Cys Glu Trp Cys Cys Glu Pro Ala Cys Thr Gly Cys Tyr | |
| Cys Cys Glu Trp Cys Cys Lys Pro Ala Cys Thr Gly Cys Tyr | |
| Cys Cys Glu Trp Cys Cys Arg Pro Ala Cys Thr Gly Cys Tyr | |
| Cys Cys Glu Trp Cys Cys His Pro Ala Cys Thr Gly Cys Tyr | |
| Cys Cys Glu Trp Cys Cys Ala Pro Ala Cys Thr Gly Cys | |
| Cys Cys Glu Trp Cys Cys Val Pro Ala Cys Thr Gly Cys | |
| Cys Cys Glu Trp Cys Cys Leu Pro Ala Cys Thr Gly Cys | |
| Cys Cys Glu Trp Cys Cys Ile Pro Ala Cys Thr Gly Cys | |
| Cys Cys Glu Trp Cys Cys Pro Pro Ala Cys Thr Gly Cys | |
| Cys Cys Glu Trp Cys Cys Met Pro Ala Cys Thr Gly Cys | |
| Cys Cys Glu Trp Cys Cys Phe Pro Ala Cys Thr Gly Cys | |
| Cys Cys Glu Trp Cys Cys Trp Pro Ala Cys Thr Gly Cys | |
| Cys Cys Glu Trp Cys Cys Gly Pro Ala Cys Thr Gly Cys | |
| Cys Cys Glu Trp Cys Cys Ser Pro Ala Cys Thr Gly Cys | |
| Cys Cys Glu Trp Cys Cys Thr Pro Ala Cys Thr Gly Cys | |
| Cys Cys Glu Trp Cys Cys Cys Pro Ala Cys Thr Gly Cys | |
| Cys Cys Glu Trp Cys Cys Gln Pro Ala Cys Thr Gly Cys | |
| Cys Cys Glu Trp Cys Cys Tyr Pro Ala Cys Thr Gly Cys | |
| Cys Cys Glu Trp Cys Cys Asp Pro Ala Cys Thr Gly Cys | |
| Cys Cys Glu Trp Cys Cys Glu Pro Ala Cys Thr Gly Cys | |
| Cys Cys Glu Trp Cys Cys Lys Pro Ala Cys Thr Gly Cys | |
| Cys Cys Glu Trp Cys Cys Arg Pro Ala Cys Thr Gly Cys | |
| Cys Cys Glu Trp Cys Cys His Pro Ala Cys Thr Gly Cys | |
| Cys Cys Glu Trp Cys Cys Asn Pro Ala Cys Thr Gly Cys Ala | |
| Cys Cys Glu Trp Cys Cys Asn Pro Ala Cys Thr Gly Cys Val | |
| Cys Cys Glu Trp Cys Cys Asn Pro Ala Cys Thr Gly Cys Leu | |
| Cys Cys Glu Trp Cys Cys Asn Pro Ala Cys Thr Gly Cys Ile | |
| Cys Cys Glu Trp Cys Cys Asn Pro Ala Cys Thr Gly Cys Pro | |
| Cys Cys Glu Trp Cys Cys Asn Pro Ala Cys Thr Gly Cys Met | |
| Cys Cys Glu Trp Cys Cys Asn Pro Ala Cys Thr Gly Cys Phe | |
| Cys Cys Glu Trp Cys Cys Asn Pro Ala Cys Thr Gly Cys Trp | |
| Cys Cys Glu Trp Cys Cys Asn Pro Ala Cys Thr Gly Cys Gly | |
| Cys Cys Glu Trp Cys Cys Asn Pro Ala Cys Thr Gly Cys Ser | |
| Cys Cys Glu Trp Cys Cys Asn Pro Ala Cys Thr Gly Cys Thr | |
| Cys Cys Glu Trp Cys Cys Asn Pro Ala Cys Thr Gly Cys Cys | |
| Cys Cys Glu Trp Cys Cys Asn Pro Ala Cys Thr Gly Cys Asn | |
| Cys Cys Glu Trp Cys Cys Asn Pro Ala Cys Thr Gly Cys Gln | |
| Cys Cys Glu Trp Cys Cys Asn Pro Ala Cys Thr Gly Cys Asp | |
| Cys Cys Glu Trp Cys Cys Asn Pro Ala Cys Thr Gly Cys Glu | |
| Cys Cys Glu Trp Cys Cys Asn Pro Ala Cys Thr Gly Cys Lys | |
| Cys Cys Glu Trp Cys Cys Asn Pro Ala Cys Thr Gly Cys Arg | |
| Cys Cys Glu Trp Cys Cys Asn Pro Ala Cys Thr Gly Cys His | |
| Cys Cys Glu Phe Cys Cys Asn Pro Ala Cys Thr Gly Cys Ala | |
| Cys Cys Glu Phe Cys Cys Asn Pro Ala Cys Thr Gly Cys Val | |
| Cys Cys Glu Phe Cys Cys Asn Pro Ala Cys Thr Gly Cys Leu | |
| Cys Cys Glu Phe Cys Cys Asn Pro Ala Cys Thr Gly Cys Ile | |
| Cys Cys Glu Phe Cys Cys Asn Pro Ala Cys Thr Gly Cys Pro | |
| Cys Cys Glu Phe Cys Cys Asn Pro Ala Cys Thr Gly Cys Met | |
| Cys Cys Glu Phe Cys Cys Asn Pro Ala Cys Thr Gly Cys Phe | |
| Cys Cys Glu Phe Cys Cys Asn Pro Ala Cys Thr Gly Cys Trp | |
| Cys Cys Glu Phe Cys Cys Asn Pro Ala Cys Thr Gly Cys Gly | |
| Cys Cys Glu Phe Cys Cys Asn Pro Ala Cys Thr Gly Cys Ser | |
| Cys Cys Glu Phe Cys Cys Asn Pro Ala Cys Thr Gly Cys Thr | |
| Cys Cys Glu Phe Cys Cys Asn Pro Ala Cys Thr Gly Cys Cys | |
| Cys Cys Glu Phe Cys Cys Asn Pro Ala Cys Thr Gly Cys Asn | |
| Cys Cys Glu Phe Cys Cys Asn Pro Ala Cys Thr Gly Cys Gln | |
| Cys Cys Glu Phe Cys Cys Asn Pro Ala Cys Thr Gly Cys Asp | |
| Cys Cys Glu Phe Cys Cys Asn Pro Ala Cys Thr Gly Cys Glu | |
| Cys Cys Glu Phe Cys Cys Asn Pro Ala Cys Thr Gly Cys Lys | |
| Cys Cys Glu Phe Cys Cys Asn Pro Ala Cys Thr Gly Cys Arg | |
| Cys Cys Glu Phe Cys Cys Asn Pro Ala Cys Thr Gly Cys His | |
| Cys Cys Ala Phe Cys Cys Asn Pro Ala Cys Thr Gly Cys Tyr | |
| Cys Cys Val Phe Cys Cys Asn Pro Ala Cys Thr Gly Cys Tyr | |
| Cys Cys Leu Phe Cys Cys Asn Pro Ala Cys Thr Gly Cys Tyr | |
| Cys Cys Ile Phe Cys Cys Asn Pro Ala Cys Thr Gly Cys Tyr | |
| Cys Cys Met Phe Cys Cys Asn Pro Ala Cys Thr Gly Cys Tyr | |
| Cys Cys Phe Phe Cys Cys Asn Pro Ala Cys Thr Gly Cys Tyr | |
| Cys Cys Trp Phe Cys Cys Asn Pro Ala Cys Thr Gly Cys Tyr | |
| Cys Cys Gly Phe Cys Cys Asn Pro Ala Cys Thr Gly Cys Tyr | |
| Cys Cys Ser Phe Cys Cys Asn Pro Ala Cys Thr Gly Cys Tyr | |
| Cys Cys Thr Phe Cys Cys Asn Pro Ala Cys Thr Gly Cys Tyr | |
| Cys Cys Cys Phe Cys Cys Asn Pro Ala Cys Thr Gly Cys Tyr | |
| Cys Cys Asn Phe Cys Cys Asn Pro Ala Cys Thr Gly Cys Tyr | |
| Cys Cys Gln Phe Cys Cys Asn Pro Ala Cys Thr Gly Cys Tyr | |
| Cys Cys Tyr Phe Cys Cys Asn Pro Ala Cys Thr Gly Cys Tyr | |
| Cys Cys Asp Phe Cys Cys Asn Pro Ala Cys Thr Gly Cys Tyr | |
| Cys Cys Lys Phe Cys Cys Asn Pro Ala Cys Thr Gly Cys Tyr | |
| Cys Cys Arg Phe Cys Cys Asn Pro Ala Cys Thr Gly Cys Tyr | |
| Cys Cys His Phe Cys Cys Asn Pro Ala Cys Thr Gly Cys Tyr | |
| Cys Cys Ala Phe Cys Cys Asn Pro Ala Cys Thr Gly Cys | |
| Cys Cys Val Phe Cys Cys Asn Pro Ala Cys Thr Gly Cys | |
| Cys Cys Leu Phe Cys Cys Asn Pro Ala Cys Thr Gly Cys | |
| Cys Cys Ile Phe Cys Cys Asn Pro Ala Cys Thr Gly Cys | |
| Cys Cys Met Phe Cys Cys Asn Pro Ala Cys Thr Gly Cys | |
| Cys Cys Phe Phe Cys Cys Asn Pro Ala Cys Thr Gly Cys | |
| Cys Cys Trp Phe Cys Cys Asn Pro Ala Cys Thr Gly Cys | |
| Cys Cys Gly Phe Cys Cys Asn Pro Ala Cys Thr Gly Cys | |
| Cys Cys Ser Phe Cys Cys Asn Pro Ala Cys Thr Gly Cys | |
| Cys Cys Thr Phe Cys Cys Asn Pro Ala Cys Thr Gly Cys | |
| Cys Cys Cys Phe Cys Cys Asn Pro Ala Cys Thr Gly Cys | |
| Cys Cys Asn Phe Cys Cys Asn Pro Ala Cys Thr Gly Cys | |
| Cys Cys Gln Phe Cys Cys Asn Pro Ala Cys Thr Gly Cys | |
| Cys Cys Tyr Phe Cys Cys Asn Pro Ala Cys Thr Gly Cys | |
| Cys Cys Asp Phe Cys Cys Asn Pro Ala Cys Thr Gly Cys | |
| Cys Cys Lys Phe Cys Cys Asn Pro Ala Cys Thr Gly Cys | |
| Cys Cys Arg Phe Cys Cys Asn Pro Ala Cys Thr Gly Cys | |
| Cys Cys His Phe Cys Cys Asn Pro Ala Cys Thr Gly Cys | |
| Cys Cys Ala Trp Cys Cys Asn Pro Ala Cys Thr Gly Cys Tyr | |
| Cys Cys Val Trp Cys Cys Asn Pro Ala Cys Thr Gly Cys Tyr | |
| Cys Cys Leu Trp Cys Cys Asn Pro Ala Cys Thr Gly Cys Tyr | |
| Cys Cys Ile Trp Cys Cys Asn Pro Ala Cys Thr Gly Cys Tyr | |
| Cys Cys Met Trp Cys Cys Asn Pro Ala Cys Thr Gly Cys Tyr | |
| Cys Cys Phe Trp Cys Cys Asn Pro Ala Cys Thr Gly Cys Tyr | |
| Cys Cys Trp Trp Cys Cys Asn Pro Ala Cys Thr Gly Cys Tyr | |
| Cys Cys Gly Trp Cys Cys Asn Pro Ala Cys Thr Gly Cys Tyr | |
| Cys Cys Ser Trp Cys Cys Asn Pro Ala Cys Thr Gly Cys Tyr | |
| Cys Cys Thr Trp Cys Cys Asn Pro Ala Cys Thr Gly Cys Tyr | |
| Cys Cys Cys Trp Cys Cys Asn Pro Ala Cys Thr Gly Cys Tyr | |
| Cys Cys Asn Trp Cys Cys Asn Pro Ala Cys Thr Gly Cys Tyr | |
| Cys Cys Gln Trp Cys Cys Asn Pro Ala Cys Thr Gly Cys Tyr | |
| Cys Cys Tyr Trp Cys Cys Asn Pro Ala Cys Thr Gly Cys Tyr | |
| Cys Cys Asp Trp Cys Cys Asn Pro Ala Cys Thr Gly Cys Tyr | |
| Cys Cys Lys Trp Cys Cys Asn Pro Ala Cys Thr Gly Cys Tyr | |
| Cys Cys Arg Trp Cys Cys Asn Pro Ala Cys Thr Gly Cys Tyr | |
| Cys Cys His Trp Cys Cys Asn Pro Ala Cys Thr Gly Cys Tyr | |
| Cys Cys Ala Trp Cys Cys Asn Pro Ala Cys Thr Gly Cys | |
| Cys Cys Val Trp Cys Cys Asn Pro Ala Cys Thr Gly Cys | |
| Cys Cys Leu Trp Cys Cys Asn Pro Ala Cys Thr Gly Cys | |
| Cys Cys Ile Trp Cys Cys Asn Pro Ala Cys Thr Gly Cys | |
| Cys Cys Met Trp Cys Cys Asn Pro Ala Cys Thr Gly Cys | |
| Cys Cys Phe Trp Cys Cys Asn Pro Ala Cys Thr Gly Cys | |
| Cys Cys Trp Trp Cys Cys Asn Pro Ala Cys Thr Gly Cys | |
| Cys Cys Gly Trp Cys Cys Asn Pro Ala Cys Thr Gly Cys | |
| Cys Cys Ser Trp Cys Cys Asn Pro Ala Cys Thr Gly Cys | |
| Cys Cys Thr Trp Cys Cys Asn Pro Ala Cys Thr Gly Cys | |
| Cys Cys Cys Trp Cys Cys Asn Pro Ala Cys Thr Gly Cys | |
| Cys Cys Asn Trp Cys Cys Asn Pro Ala Cys Thr Gly Cys | |
| Cys Cys Gln Trp Cys Cys Asn Pro Ala Cys Thr Gly Cys | |
| Cys Cys Tyr Trp Cys Cys Asn Pro Ala Cys Thr Gly Cys | |
| Cys Cys Asp Trp Cys Cys Asn Pro Ala Cys Thr Gly Cys | |
| Cys Cys Lys Trp Cys Cys Asn Pro Ala Cys Thr Gly Cys | |
| Cys Cys Arg Trp Cys Cys Asn Pro Ala Cys Thr Gly Cys | |
| Cys Cys His Trp Cys Cys Asn Pro Ala Cys Thr Gly Cys | |
| Cys Glu Leu Cys Ile Asn Val Ala Cys Thr Gly Cys | |
| Cys Glu Leu Cys Val Asn Val Ala Cys Thr Gly Cys | |
| Cys Ala Glu Leu Cys Cys Asn Pro Ala Cys | |
| Cys Cys Gly Leu Cys Cys Asn Pro Ala Cys Ala Gly Cys | |
| Cys Cys Gly Leu Cys Cys Tyr Pro Ala Cys Ala Gly Cys | |
| Cys Glu Leu Cys Cys Asn Pro Ala Cys Ala Gly Cys | |
| Cys Cys Asp Val Cys Cys Tyr Pro Ala Cys Thr Gly Cys | |
| Cys Cys Glu Leu Cys Cys Asn Pro Ala Cys Ala Gly Cys | |
| Cys Cys Glu Leu Cys Cys Tyr Pro Ala Cys Ala Gly Cys | |
| Cys Cys Glu Leu Cys Cys Asn Pro Ala Cys Thr Gly Cys | |
| Cys Cys Glu Leu Cys Cys Tyr Pro Ala Cys Thr Gly Cys | |
| Cys Cys Glu Leu Cys Cys Asn Pro Gly Cys Thr Gly Cys | |
| Cys Cys Glu Ala Cys Cys Asn Pro Ala Cys Thr Gly Cys | |
| Cys Cys Glu Lys Cys Cys Asn Pro Ala Cys Thr Gly Cys | |
| Cys Cys Glu Leu Cys Cys Asn Pro Ala Cys Thr Ala Cys | |
| Cys Cys Pro Leu Cys Cys Asn Pro Ala Cys Thr Gly Cys | |
| Ala Cys Glu Leu Cys Ala Asn Pro Ala Cys Thr Gly Cys | |
| Cys Cys Glu Leu Ala Cys Asn Pro Ala Cys Thr Gly Ala | |
| Cys Glu Leu Cys Ala Asn Pro Ala Cys Thr Gly Cys | |
| Cys Cys Glu Leu Ala Cys Asn Pro Ala Cys | |
| Cys Cys Asp Val Cys Cys Asn Pro Ala Cys Ala Gly Cys | |
| Cys Cys Asp Val Cys Cys Asn Pro Ala Cys Thr Gly Cys | |
| Cys Cys Asp Val Cys Cys Asn Pro Ala Cys Ala Gly Cys Tyr | |
| Cys Cys Asp Val Cys Cys Asn Pro Ala Cys Thr Gly Cys Tyr | |
| Cys Cys Glu Leu Cys Cys Tyr Pro Ala Cys Ala Gly Cys | |
| Cys Cys Ile Cys Cys Asn Pro Ala Cys Phe Gly Cys | |
| Cys Cys Asn Tyr Cys Cys Ser Pro Cys Gly Cys | |
| Cys Cys Asp Val Cys Cys Asn Pro Ala Cys Ala Gly Cys | (SEQ ID NO. ) |
| Cys Cys Asp Ala Cys Cys Asn Pro Ala Cys Ala Gly Cys | (SEQ ID NO. ) |
| Cys Cys Asp Cys Cys Cys Asn Pro Ala Cys Ala Gly Cys | (SEQ ID NO. ) |
| Cys Cys Asp Asp Cys Cys Asn Pro Ala Cys Ala Gly Cys | (SEQ ID NO. ) |
| Cys Cys Asp Glu Cys Cys Asn Pro Ala Cys Ala Gly Cys | (SEQ ID NO. ) |
| Cys Cys Asp Phe Cys Cys Asn Pro Ala Cys Ala Gly Cys | (SEQ ID NO. ) |
| Cys Cys Asp Gly Cys Cys Asn Pro Ala Cys Ala Gly Cys | (SEQ ID NO. ) |
| Cys Cys Asp His Cys Cys Asn Pro Ala Cys Ala Gly Cys | (SEQ ID NO. ) |
| Cys Cys Asp Ile Cys Cys Asn Pro Ala Cys Ala Gly Cys | (SEQ ID NO. ) |
| Cys Cys Asp Lys Cys Cys Asn Pro Ala Cys Ala Gly Cys | (SEQ ID NO. ) |
| Cys Cys Asp Leu Cys Cys Asn Pro Ala Cys Ala Gly Cys | (SEQ ID NO. ) |
| Cys Cys Asp Met Cys Cys Asn Pro Ala Cys Ala Gly Cys | (SEQ ID NO. ) |
| Cys Cys Asp Asn Cys Cys Asn Pro Ala Cys Ala Gly Cys | (SEQ ID NO. ) |
| Cys Cys Asp Pro Cys Cys Asn Pro Ala Cys Ala Gly Cys | (SEQ ID NO. ) |
| Cys Cys Asp Gln Cys Cys Asn Pro Ala Cys Ala Gly Cys | (SEQ ID NO. ) |
| Cys Cys Asp Arg Cys Cys Asn Pro Ala Cys Ala Gly Cys | (SEQ ID NO. ) |
| Cys Cys Asp Ser Cys Cys Asn Pro Ala Cys Ala Gly Cys | (SEQ ID NO. ) |
| Cys Cys Asp Thr Cys Cys Asn Pro Ala Cys Ala Gly Cys | (SEQ ID NO. ) |
| Cys Cys Asp Trp Cys Cys Asn Pro Ala Cys Ala Gly Cys | (SEQ ID NO. ) |
| Cys Cys Asp Tyr Cys Cys Asn Pro Ala Cys Ala Gly Cys | (SEQ ID NO. ) |
| Cys Cys Glu Ile Cys Cys Asn Pro Ala Cys Phe Gly Cys | (SEQ ID NO. ) |
| Cys Cys Glu Ala Cys Cys Asn Pro Ala Cys Phe Gly Cys | (SEQ ID NO. ) |
| Cys Cys Glu Cys Cys Cys Asn Pro Ala Cys Phe Gly Cys | (SEQ ID NO. ) |
| Cys Cys Glu Asp Cys Cys Asn Pro Ala Cys Phe Gly Cys | (SEQ ID NO. ) |
| Cys Cys Glu Glu Cys Cys Asn Pro Ala Cys Phe Gly Cys | (SEQ ID NO. ) |
| Cys Cys Glu Phe Cys Cys Asn Pro Ala Cys Phe Gly Cys | (SEQ ID NO. ) |
| Cys Cys Glu Gly Cys Cys Asn Pro Ala Cys Phe Gly Cys | (SEQ ID NO. ) |
| Cys Cys Glu His Cys Cys Asn Pro Ala Cys Phe Gly Cys | (SEQ ID NO. ) |
| Cys Cys Glu Lys Cys Cys Asn Pro Ala Cys Phe Gly Cys | (SEQ ID NO. ) |
| Cys Cys Glu Leu Cys Cys Asn Pro Ala Cys Phe Gly Cys | (SEQ ID NO. ) |
| Cys Cys Glu Met Cys Cys Asn Pro Ala Cys Phe Gly Cys | (SEQ ID NO. ) |
| Cys Cys Glu Asn Cys Cys Asn Pro Ala Cys Phe Gly Cys | (SEQ ID NO. ) |
| Cys Cys Glu Pro Cys Cys Asn Pro Ala Cys Phe Gly Cys | (SEQ ID NO. ) |
| Cys Cys Glu Gln Cys Cys Asn Pro Ala Cys Phe Gly Cys | (SEQ ID NO. ) |
| Cys Cys Glu Arg Cys Cys Asn Pro Ala Cys Phe Gly Cys | (SEQ ID NO. ) |
| Cys Cys Glu Ser Cys Cys Asn Pro Ala Cys Phe Gly Cys | (SEQ ID NO. ) |
| Cys Cys Glu Thr Cys Cys Asn Pro Ala Cys Phe Gly Cys | (SEQ ID NO. ) |
| Cys Cys Glu Val Cys Cys Asn Pro Ala Cys Phe Gly Cys | (SEQ ID NO. ) |
| Cys Cys Glu Trp Cys Cys Asn Pro Ala Cys Phe Gly Cys | (SEQ ID NO. ) |
| Cys Cys Glu Tyr Cys Cys Asn Pro Ala Cys Phe Gly Cys | (SEQ ID NO. ) |
| Cys Cys Glu Leu Cys Cys Asn Pro Ala Cys Ala Pro Cys | (SEQ ID NO. ) |
| Cys Cys Glu Ala Cys Cys Asn Pro Ala Cys Ala Pro Cys | (SEQ ID NO. ) |
| Cys Cys Glu Cys Cys Cys Asn Pro Ala Cys Ala Pro Cys | (SEQ ID NO. ) |
| Cys Cys Glu Asp Cys Cys Asn Pro Ala Cys Ala Pro Cys | (SEQ ID NO. ) |
| Cys Cys Glu Glu Cys Cys Asn Pro Ala Cys Ala Pro Cys | (SEQ ID NO. ) |
| Cys Cys Glu Phe Cys Cys Asn Pro Ala Cys Ala Pro Cys | (SEQ ID NO. ) |
| Cys Cys Glu Gly Cys Cys Asn Pro Ala Cys Ala Pro Cys | (SEQ ID NO. ) |
| Cys Cys Glu His Cys Cys Asn Pro Ala Cys Ala Pro Cys | (SEQ ID NO. ) |
| Cys Cys Glu Ile Cys Cys Asn Pro Ala Cys Ala Pro Cys | (SEQ ID NO. ) |
| Cys Cys Glu Lys Cys Cys Asn Pro Ala Cys Ala Pro Cys | (SEQ ID NO. ) |
| Cys Cys Glu Met Cys Cys Asn Pro Ala Cys Ala Pro Cys | (SEQ ID NO. ) |
| Cys Cys Glu Asn Cys Cys Asn Pro Ala Cys Ala Pro Cys | (SEQ ID NO. ) |
| Cys Cys Glu Pro Cys Cys Asn Pro Ala Cys Ala Pro Cys | (SEQ ID NO. ) |
| Cys Cys Glu Gln Cys Cys Asn Pro Ala Cys Ala Pro Cys | (SEQ ID NO. ) |
| Cys Cys Glu Arg Cys Cys Asn Pro Ala Cys Ala Pro Cys | (SEQ ID NO. ) |
| Cys Cys Glu Ser Cys Cys Asn Pro Ala Cys Ala Pro Cys | (SEQ ID NO. ) |
| Cys Cys Glu Thr Cys Cys Asn Pro Ala Cys Ala Pro Cys | (SEQ ID NO. ) |
| Cys Cys Glu Val Cys Cys Asn Pro Ala Cys Ala Pro Cys | (SEQ ID NO. ) |
| Cys Cys Glu Trp Cys Cys Asn Pro Ala Cys Ala Pro Cys | (SEQ ID NO. ) |
| Cys Cys Glu Tyr Cys Cys Asn Pro Ala Cys Ala Pro Cys | (SEQ ID NO. ) |
| Cys Cys Glu Leu Cys Cys Asn Pro Ala Cys Phe Gly Cys | (SEQ ID NO. ) |
| Cys Cys Glu Ala Cys Cys Asn Pro Ala Cys Phe Gly Cys | (SEQ ID NO. ) |
| Cys Cys Glu Cys Cys Cys Asn Pro Ala Cys Phe Gly Cys | (SEQ ID NO. ) |
| Cys Cys Glu Asp Cys Cys Asn Pro Ala Cys Phe Gly Cys | (SEQ ID NO. ) |
| Cys Cys Glu Glu Cys Cys Asn Pro Ala Cys Phe Gly Cys | (SEQ ID NO. ) |
| Cys Cys Glu Phe Cys Cys Asn Pro Ala Cys Phe Gly Cys | (SEQ ID NO. ) |
| Cys Cys Glu Gly Cys Cys Asn Pro Ala Cys Phe Gly Cys | (SEQ ID NO. ) |
| Cys Cys Glu His Cys Cys Asn Pro Ala Cys Phe Gly Cys | (SEQ ID NO. ) |
| Cyc Cys Glu Ile Cys Cys Asn Pro Ala Cys Phe Gly Cys | (SEQ ID NO. ) |
| Cys Cys Glu Lys Cys Cys Asn Pro Ala Cys Phe Gly Cys | (SEQ ID NO. ) |
| Cys Cys Glu Met Cys Cys Asn Pro Ala Cys Phe Gly Cys | (SEQ ID NO. ) |
| Cys Cys Glu Asn Cys Cys Asn Pro Ala Cys Phe Gly Cys | (SEQ ID NO. ) |
| Cys Cys Glu Pro Cys Cys Asn Pro Ala Cys Phe Gly Cys | (SEQ ID NO. ) |
| Cys Cys Glu Gln Cys Cys Asn Pro Ala Cys Phe Gly Cys | (SEQ ID NO. ) |
| Cys Cys Glu Arg Cys Cys Asn Pro Ala Cys Phe Gly Cys | (SEQ ID NO. ) |
| Cys Cys Glu Ser Cys Cys Asn Pro Ala Cys Phe Gly Cys | (SEQ ID NO. ) |
| Cys Cys Glu Thr Cys Cys Asn Pro Ala Cys Phe Gly Cys | (SEQ ID NO. ) |
| Cys Cys Glu Val Cys Cys Asn Pro Ala Cys Phe Gly Cys | (SEQ ID NO. ) |
| Cys Cys Glu Trp Cys Cys Asn Pro Ala Cys Phe Gly Cys | (SEQ ID NO. ) |
| Cys Cys Glu Tyr Cys Cys Asn Pro Ala Cys Phe Gly Cys | (SEQ ID NO. ) |
| Cys Cys Glu Val Cys Cys Asn Pro Ala Cys Ala Gly Cys | (SEQ ID NO. ) |
| Cys Cys Glu Ala Cys Cys Asn Pro Ala Cys Ala Gly Cys | (SEQ ID NO. ) |
| Cys Cys Glu Cys Cys Cys Asn Pro Ala Cys Ala Gly Cys | (SEQ ID NO. ) |
| Cys Cys Glu Asp Cys Cys Asn Pro Ala Cys Ala Gly Cys | (SEQ ID NO. ) |
| Cys Cys Glu Glu Cys Cys Asn Pro Ala Cys Ala Gly Cys | (SEQ ID NO. ) |
| Cys Cys Glu Phe Cys Cys Asn Pro Ala Cys Ala Gly Cys | (SEQ ID NO. ) |
| Cys Cys Glu Gly Cys Cys Asn Pro Ala Cys Ala Gly Cys | (SEQ ID NO. ) |
| Cys Cys Glu His Cys Cys Asn Pro Ala Cys Ala Gly Cys | (SEQ ID NO. ) |
| Cys Cys Glu Ile Cys Cys Asn Pro Ala Cys Ala Gly Cys | (SEQ ID NO. ) |
| Cys Cys Glu Lys Cys Cys Asn Pro Ala Cys Ala Gly Cys | (SEQ ID NO. ) |
| Cys Cys Glu Leu Cys Cys Asn Pro Ala Cys Ala Gly Cys | (SEQ ID NO. ) |
| Cys Cys Glu Met Cys Cys Asn Pro Ala Cys Ala Gly Cys | (SEQ ID NO. ) |
| Cys Cys Glu Asn Cys Cys Asn Pro Ala Cys Ala Gly Cys | (SEQ ID NO. ) |
| Cys Cys Glu Pro Cys Cys Asn Pro Ala Cys Ala Gly Cys | (SEQ ID NO. ) |
| Cys Cys Glu Gln Cys Cys Asn Pro Ala Cys Ala Gly Cys | (SEQ ID NO. ) |
| Cys Cys Glu Arg Cys Cys Asn Pro Ala Cys Ala Gly Cys | (SEQ ID NO. ) |
| Cys Cys Glu Ser Cys Cys Asn Pro Ala Cys Ala Gly Cys | (SEQ ID NO. ) |
| Cys Cys Glu Thr Cys Cys Asn Pro Ala Cys Ala Gly Cys | (SEQ ID NO. ) |
| Cys Cys Glu Trp Cys Cys Asn Pro Ala Cys Ala Gly Cys | (SEQ ID NO. ) |
| Cys Cys Glu Tyr Cys Cys Asn Pro Ala Cys Ala Gly Cys | (SEQ ID NO. ) |
| Cys Cys Glu Leu Cys Cys Asn Pro Ala Cys Thr Gly Cys Tyr | (SEQ ID NO: ) |
| Cys Cys Glu Tyr Cys Cys Asn Pro Ala Cys Thr Gly Cys Tyr | (SEQ ID NO: ) |
| and | |
| Cys Cys Glu Leu Cys Cys Asn Pro Ala Cys Thr Gly Cys. | (SEQ ID NO: ) |

142-153. (canceled)

The application's sequence listing, which the Patent Office published only in electronic form, follows.

SEQUENCE LISTING (14495 sequences)

SEQ ID NO: 1 - protein, 21 aa, Artificial Sequence
  Synthetically generated peptide
  VARIANT (1)..(2): Xaa = any amino acid
  misc_feature (3)..(5): Xaa can be any naturally occurring amino acid
  VARIANT (8)..(9): Xaa = any amino acid
  misc_feature (12)..(14): Xaa can be any naturally occurring amino acid
  misc_feature (16)..(17): Xaa can be any naturally occurring amino acid
  misc_feature (19)..(21): Xaa can be any naturally occurring amino acid
XXXXXCCXXCCXXXCXXCXXX

SEQ ID NO: 2 - protein, 21 aa, Artificial Sequence
  Synthetically generated peptide
  VARIANT (9)..(9): Xaa = Leu, Ile, Val, Trp, Tyr or Phe
  VARIANT (19)..(19): Xaa=Trp, Tyr, Phe or Leu
  VARIANT (20)..(21): Xaa 20 = Asp, Xaa21 = Phe
NSSNYCCEXCCNPACTGCXXX

SEQ ID NO: 3 - protein, 14 aa, Artificial Sequence
  Synthetically generated peptide
CCEYCCNPACTGCY

SEQ ID NO: 4 - protein, 19 aa, Artificial Sequence
  Synthetically generated peptide
NSSNYCCELCCNPACTGCY

SEQ ID NO: 5 - protein, 19 aa, Artificial Sequence
  Synthetically generated peptide
NSSNYCCEYCCNPACTGCY

SEQ ID NO: 6 - protein, 13 aa, Artificial Sequence
  Synthetically generated peptide
CCEYCCNPACTGC

SEQ ID NO: 7 - protein, 18 aa, Escherichia coli
NTFYCCELCCNPACAGCY

SEQ ID NO: 8 - protein, 14 aa, Artificial Sequence
  Synthetically generated peptide
CCELCCNPACTGCY

SEQ ID NO: 9 - protein, 15 aa, Artificial Sequence
  Synthetically generated peptide
NCCELCCNPACTGCY

SEQ ID NO: 10 - protein, 15 aa, Artificial Sequence
  Synthetically generated peptide
NCCELCCNPACWGCY

SEQ ID NO: 11 - protein, 15 aa, Artificial Sequence
  Synthetically generated peptide
NCCEFCCNPACTGCY

SEQ ID NO: 12 - protein, 15 aa, Artificial Sequence
  Synthetically generated peptide
NCCEYCCNPACTGCY

SEQ ID NO: 13 - protein, 15 aa, Artificial Sequence
  Synthetically generated peptide
NCCEWCCNPACTGCY

SEQ ID NO: 14 - protein, 15 aa, Artificial Sequence
  Synthetically generated peptide
NCCERCCNPACTGCY

SEQ ID NO: 15 - protein, 15 aa, Artificial Sequence
  Synthetically generated peptide
NCCEKCCNPACTGCY

SEQ ID NO: 16 - protein, 21 aa, Artificial Sequence
  Synthetically generated peptide
NSSNYCCELCCNPACTGCYDF

SEQ ID NO: 17 - protein, 21 aa, Artificial Sequence
  Synthetically generated peptide
NSSNYCCELCCNPACWGCYDF

SEQ ID NO: 18 - protein, 21 aa, Artificial Sequence
  Synthetically generated peptide
NSSNYCCEFCCNPACTGCYDF

SEQ ID NO: 19 - protein, 21 aa, Artificial Sequence
  Synthetically generated peptide
NSSNYCCEYCCNPACTGCYDF

SEQ ID NO: 20 - protein, 21 aa, Artificial Sequence
  Synthetically generated peptide
NSSNYCCEWCCNPACTGCYDF

SEQ ID NO: 21 - protein, 21 aa, Artificial Sequence
  Synthetically generated peptide
NSSNYCCERCCNPACTGCYDF

SEQ ID NO: 22 - protein, 21 aa, Artificial Sequence
  Synthetically generated peptide
NSSNYCCEKCCNPACTGCYDF

SEQ ID NO: 23 - protein, 16 aa, Artificial Sequence
  Synthetically generated peptide
CCELCCNPACTGCYDF

SEQ ID NO: 24 - protein, 16 aa, Artificial Sequence
  Synthetically generated peptide
CCELCCNPACWGCYDF

SEQ ID NO: 25 - protein, 16 aa, Artificial Sequence
  Synthetically generated peptide
CCEFCCNPACTGCYDF

SEQ ID NO: 26 - protein, 16 aa, Artificial Sequence
  Synthetically generated peptide
CCEYCCNPACTGCYDF

SEQ ID NO: 27 - protein, 16 aa, Artificial Sequence
  Synthetically generated peptide
CCEWCCNPACTGCYDF

SEQ ID NO: 28 - protein, 16 aa, Artificial Sequence
  Synthetically generated peptide
CCERCCNPACTGCYDF

SEQ ID NO: 29 - protein, 16 aa, Artificial Sequence
  Synthetically generated peptide
CCEKCCNPACTGCYDF

SEQ ID NO: 30 - protein, 17 aa, Artificial Sequence
  Synthetically generated peptide
NCCELCCNPACTGCYDF

SEQ ID NO: 31 - protein, 17 aa, Artificial Sequence
  Synthetically generated peptide
NCCELCCNPACWGCYDF

SEQ ID NO: 32 - protein, 17 aa, Artificial Sequence
  Synthetically generated peptide
NCCEFCCNPACTGCYDF

SEQ ID NO: 33 - protein, 17 aa, Artificial Sequence
  Synthetically generated peptide
NCCEYCCNPACTGCYDF

SEQ ID NO: 34 - protein, 17 aa, Artificial Sequence
  Synthetically generated peptide
NCCEWCCNPACTGCYDF

SEQ ID NO: 35 - protein, 17 aa, Artificial Sequence
  Synthetically generated peptide
NCCERCCNPACTGCYDF

SEQ ID NO: 36 - protein, 17 aa, Artificial Sequence
  Synthetically generated peptide
NCCEKCCNPACTGCYDF

SEQ ID NO: 37 - protein, 19 aa, Artificial Sequence
  Synthetically generated peptide
QSSNYCCEYCCNPACTGCY

SEQ ID NO: 38 - protein, 19 aa, Artificial Sequence
  Synthetically generated peptide
NTSNYCCEYCCNPACTGCY

SEQ ID NO: 39 - protein, 19 aa, Artificial Sequence
  Synthetically generated peptide
NLSNYCCEYCCNPACTGCY

SEQ ID NO: 40 - protein, 19 aa, Artificial Sequence
  Synthetically generated peptide
NISNYCCEYCCNPACTGCY

SEQ ID NO: 41 - protein, 19 aa, Artificial Sequence
  Synthetically generated peptide
NSSQYCCEYCCNPACTGCY

SEQ ID NO: 42 - protein, 18 aa, Artificial Sequence
  Synthetically generated peptide
SSNYCCEYCCNPACTGCY

SEQ ID NO: 43 - protein, 19 aa, Artificial Sequence
  Synthetically generated peptide
QSSQYCCEYCCNPACTGCY

SEQ ID NO: 44 - protein, 18 aa, Artificial Sequence
  Synthetically generated peptide
SSQYCCEYCCNPACTGCY

SEQ ID NO: 45 - protein, 19 aa, Artificial Sequence
  Synthetically generated peptide
NSSNYCCEACCNPACTGCY

SEQ ID NO: 46 - protein, 19 aa, Artificial Sequence
  Synthetically generated peptide
NSSNYCCERCCNPACTGCY

SEQ ID NO: 47 - protein, 19 aa, Artificial Sequence
  Synthetically generated peptide
NSSNYCCENCCNPACTGCY

SEQ ID NO: 48 - protein, 19 aa, Artificial Sequence
  Synthetically generated peptide
NSSNYCCEDCCNPACTGCY

SEQ ID NO: 49 - protein, 19 aa, Artificial Sequence
  Synthetically generated peptide
NSSNYCCECCCNPACTGCY

SEQ ID NO: 50 - protein, 19 aa, Artificial Sequence
  Synthetically generated peptide
NSSNYCCEQCCNPACTGCY

SEQ ID NO: 51 - protein, 19 aa, Artificial Sequence
  Synthetically generated peptide
NSSNYCCEECCNPACTGCY

SEQ ID NO: 52 - protein, 19 aa, Artificial Sequence
  Synthetically generated peptide
NSSNYCCEGCCNPACTGCY

SEQ ID NO: 53 - protein, 19 aa, Artificial Sequence
  Synthetically generated peptide
NSSNYCCEHCCNPACTGCY

SEQ ID NO: 54 - protein, 19 aa, Artificial Sequence
  Synthetically generated peptide
NSSNYCCEICCNPACTGCY

SEQ ID NO: 55 - protein, 19 aa, Artificial Sequence
  Synthetically generated peptide
NSSNYCCEKCCNPACTGCY

SEQ ID NO: 56 - protein, 19 aa, Artificial Sequence
  Synthetically generated peptide
NSSNYCCEMCCNPACTGCY

SEQ ID NO: 57 - protein, 19 aa, Artificial Sequence
  Synthetically generated peptide
NSSNYCCEFCCNPACTGCY

SEQ ID NO: 58 - protein, 19 aa, Artificial Sequence
  Synthetically generated peptide
NSSNYCCEPCCNPACTGCY

SEQ ID NO: 59 - protein, 19 aa, Artificial Sequence
  Synthetically generated peptide
NSSNYCCESCCNPACTGCY

SEQ ID NO: 60 - protein, 19 aa, Artificial Sequence
  Synthetically generated peptide
NSSNYCCETCCNPACTGCY

SEQ ID NO: 61 - protein, 19 aa, Artificial Sequence
  Synthetically generated peptide
NSSNYCCEWCCNPACTGCY

SEQ ID NO: 62 - protein, 19 aa, Artificial Sequence
  Synthetically generated peptide
NSSNYCCEVCCNPACTGCY

SEQ ID NO: 63 - protein, 14 aa, Artificial Sequence
  Synthetically generated peptide
CCEACCNPACTGCY

SEQ ID NO: 64 - protein, 14 aa, Artificial Sequence
  Synthetically generated peptide
CCERCCNPACTGCY

SEQ ID NO: 65 - protein, 14 aa, Artificial Sequence
  Synthetically generated peptide
CCENCCNPACTGCY

SEQ ID NO: 66 - protein, 14 aa, Artificial Sequence
  Synthetically generated peptide
CCEDCCNPACTGCY

SEQ ID NO: 67 - protein, 14 aa, Artificial Sequence
  Synthetically generated peptide
CCECCCNPACTGCY

SEQ ID NO: 68 - protein, 14 aa, Artificial Sequence
  Synthetically generated peptide
CCEQCCNPACTGCY

SEQ ID NO: 69 - protein, 14 aa, Artificial Sequence
  Synthetically generated peptide
CCEECCNPACTGCY

SEQ ID NO: 70 - protein, 14 aa, Artificial Sequence
  Synthetically generated peptide
CCEGCCNPACTGCY

SEQ ID NO: 71 - protein, 14 aa, Artificial Sequence
  Synthetically generated peptide
CCEHCCNPACTGCY

SEQ ID NO: 72 - protein, 14 aa, Artificial Sequence
  Synthetically generated peptide
CCEICCNPACTGCY

SEQ ID NO: 73 - protein, 14 aa, Artificial Sequence
  Synthetically generated peptide
CCEKCCNPACTGCY

SEQ ID NO: 74 - protein, 14 aa, Artificial Sequence
  Synthetically generated peptide
CCEMCCNPACTGCY

SEQ ID NO: 75 - protein, 14 aa, Artificial Sequence
  Synthetically generated peptide
CCEFCCNPACTGCY

SEQ ID NO: 76 - protein, 14 aa, Artificial Sequence
  Synthetically generated peptide
CCEPCCNPACTGCY

SEQ ID NO: 77 - protein, 14 aa, Artificial Sequence
  Synthetically generated peptide
CCESCCNPACTGCY

SEQ ID NO: 78 - protein, 14 aa, Artificial Sequence
  Synthetically generated peptide
CCETCCNPACTGCY

SEQ ID NO: 79 - protein, 14 aa, Artificial Sequence
  Synthetically generated peptide
CCEWCCNPACTGCY

SEQ ID NO: 80 - protein, 14 aa, Artificial Sequence
  Synthetically generated peptide
CCEVCCNPACTGCY

SEQ ID NO: 81 - protein, 14 aa, Artificial Sequence
  Synthetically generated peptide
CCELCCNPACWGCY

SEQ ID NO: 82 - protein, 13 aa, Artificial Sequence
  Synthetically generated peptide
CCEACCNPACTGC

SEQ ID NO: 83 - protein, 13 aa, Artificial Sequence
  Synthetically generated peptide
CCERCCNPACTGC

SEQ ID NO: 84 - protein, 13 aa, Artificial Sequence
  Synthetically generated peptide
CCENCCNPACTGC

SEQ ID NO: 85 - protein, 13 aa, Artificial Sequence
  Synthetically generated peptide
CCEDCCNPACTGC

SEQ ID NO: 86 - protein, 13 aa, Artificial Sequence
  Synthetically generated peptide
CCECCCNPACTGC

SEQ ID NO: 87 - protein, 13 aa, Artificial Sequence
  Synthetically generated peptide
CCEQCCNPACTGC

SEQ ID NO: 88 - protein, 13 aa, Artificial Sequence
  Synthetically generated peptide
CCEECCNPACTGC

SEQ ID NO: 89 - protein, 13 aa, Artificial Sequence
  Synthetically generated peptide
CCEGCCNPACTGC

SEQ ID NO: 90 - protein, 13 aa, Artificial Sequence
  Synthetically generated peptide
CCEHCCNPACTGC

SEQ ID NO: 91 - protein, 13 aa, Artificial Sequence
  Synthetically generated peptide
CCEICCNPACTGC

SEQ ID NO: 92 - protein, 13 aa, Artificial Sequence
  Synthetically generated peptide
CCEKCCNPACTGC

SEQ ID NO: 93 - protein, 13 aa, Artificial Sequence
  Synthetically generated peptide
CCEMCCNPACTGC

SEQ ID NO: 94 - protein, 13 aa, Artificial Sequence
  Synthetically generated peptide
CCEFCCNPACTGC

SEQ ID NO: 95 - protein, 13 aa, Artificial Sequence
  Synthetically generated peptide
CCEPCCNPACTGC

SEQ ID NO: 96 - protein, 13 aa, Artificial Sequence
  Synthetically generated peptide
CCESCCNPACTGC

SEQ ID NO: 97 - protein, 13 aa, Artificial Sequence
  Synthetically generated peptide
CCETCCNPACTGC

SEQ ID NO: 98 - protein, 13 aa, Artificial Sequence
  Synthetically generated peptide
CCEWCCNPACTGC

SEQ ID NO: 99 - protein, 13 aa, Artificial Sequence
  Synthetically generated peptide
CCEVCCNPACTGC

SEQ ID NO: 100 - protein, 54 aa, Artificial Sequence
  Synthetically generated peptide
MKKSILFIFLSVLSFSPFAQDAKPAGSSKEKITLESKKCNIVKKSNKSGPESMN

SEQ ID NO: 101 - protein, 19 aa, Artificial Sequence
  Synthetically generated peptide
NSSNYCCELCCNPACWGCY

SEQ ID NO: 102 - protein, 18 aa, Escherichia coli
NTFYCCELCCYPACAGCN

SEQ ID NO: 103 - protein, 18 aa, Citrobacter freundii
NTFYCCELCCNPACAGCY

SEQ ID NO: 104 - protein, 30 aa, Yersinia enterocolitica
QACDPPSPPAEVSSDWDCCDVCCNPACAGC

SEQ ID NO: 105 - protein, 30 aa, Yersinia enterocolitica
QACDPPLPPAEVSSDWDCCDVCCNPACAGC

SEQ ID NO: 106 - protein, 30 aa, Yersinia enterocolitica
KACDTQTPSPSEENDDWCCEVCCNPACAGC

SEQ ID NO: 107 - protein, 53 aa, Yersinia enterocolitica
QETASGQVGDVSSSTIATEVSEAECGTQSATTQGENDWDWCCELCCNPACFGC

SEQ ID NO: 108 - protein, 16 aa, Yersinia kristensenii
SDWCCEVCCNPACAGC

SEQ ID NO: 109 - protein, 17 aa, Vibrio cholerae
IDCCEICCNPACFGCLN

SEQ ID NO: 110 - protein, 17 aa, Vibrio mimicus
IDCCEICCNPACFGCLN

SEQ ID NO: 111 - protein, 18 aa, Escherichia coli
NTFYCCELCCNPACAPCY

SEQ ID NO: 112 - protein, 13 aa, Vibrio cholerae
IDCCEICCNPACF

SEQ ID NO: 113 - protein, 14 aa, Vibrio cholerae
IDCCEICCNPACFG

SEQ ID NO: 114 - protein, 17 aa, Vibrio mimicus
IDCCEICCNPACFGCLN

SEQ ID NO: 115 - protein, 17 aa, Vibrio mimicus
IDRCEICCNPACFGCLN

SEQ ID NO: 116 - protein, 16 aa, Yersinia enterocolitica
DWDCCDVCCNPACAGC

SEQ ID NO: 117 - protein, 16 aa, Yersinia enterocolitica
DWDCCDVCCNPACAGC

SEQ ID NO: 118 - protein, 17 aa, Yersinia enterocolitica
NDDWCCEVCCNPACAGC

SEQ ID NO: 119 - protein, 16 aa, Yersinia enterocolitica
WDWCCELCCNPACFGC

SEQ ID NO: 120 - protein, 30 aa, Yersinia enterocolitica
QACDPPSPPAEVSSDWDCCDVCCDPACAGC

SEQ ID NO: 121 - protein, 72 aa, Escherichia coli
MKKLMLAIFISVLSFPSFSQSTESLDSSKEKITLETKKCDVVKNNSEKKSENMNNTFYCCELCCNPACAGCY

SEQ ID NO: 122 - protein, 72 aa, Escherichia coli
MKKSILFIFLSVLSFSPFAQDAKPVESSKEKITLESKKCNIAKKSNKSGPESMNSSNYCCELCCNPACTGCY

SEQ ID NO: 123 - protein, 71 aa, Yersinia enterocolitica
MKKIVFVLVLMLSSFGAFGQETVSGQFSDALSTPITAEVYKQACDPPLPPAEVSSDWDCCDVCCNPACAGC

SEQ ID NO: 124 - protein, 53 aa, Artificial Sequence
  Synthetically generated peptide
MKKSILFIFLSVLSFSPFAQDAKPAGSSKEKITLESKKCNIVKKSNKSGPESM

SEQ ID NO: 125 - protein, 53 aa, Escherichia coli
MKKSILFIFLSVLSFSPFAQDAKPAGSSKEKITLESKKCNIVKKNNESSPESM

SEQ ID NO: 126 - protein, 5 aa, Artificial Sequence
  Synthetically generated peptide
NSSNY

SEQ ID NO: 127 - protein, 6 aa, Artificial Sequence
  Synthetically generated peptide
KKKKKK

SEQ ID NO: 128 - protein, 7 aa, Artificial Sequence
  Synthetically generated peptide
DKKKKKK

SEQ ID NO: 129 - protein, 21 aa, Artificial Sequence
  Synthetically generated peptide
  VARIANT (1)..(4): Xaa = any amino acid or is missing
  misc_feature (5)..(5): Xaa can be any naturally occurring amino acid
  VARIANT (8)..(8): Xaa = Glu or Asp
  VARIANT (9)..(9): Xaa = Leu, Ile, Val, Trp, Tyr or Phe
  VARIANT (16)..(16): Xaa =  Thr, Ala, or Trp
  VARIANT (19)..(19): Xaa = Trp, Tyr, Phe or Leu
  VARIANT (20)..(21): Xaa = Asp, Phe
XXXXXCCXXCCNPACXGCXXX

SEQ ID NO: 130 - protein, 13 aa, Artificial Sequence
  Synthetically generated peptide
CCYCCNPACTGCY

SEQ ID NO: 131 - protein, 12 aa, Artificial Sequence
  Synthetically generated peptide
CCCCNPACTGCY

SEQ ID NO: 132 - protein, 11 aa, Artificial Sequence
  Synthetically generated peptide
CCCCPACTGCY

SEQ ID NO: 133 - protein, 10 aa, Artificial Sequence
  Synthetically generated peptide
CCCCACTGCY

SEQ ID NO: 134 - protein, 10 aa, Artificial Sequence
  Synthetically generated peptide
CCCCPCTGCY

SEQ ID NO: 135 - protein, 10 aa, Artificial Sequence
  Synthetically generated peptide
CCCCPACGCY

SEQ ID NO: 136 - protein, 10 aa, Artificial Sequence
  Synthetically generated peptide
CCCCPACTCY

SEQ ID NO: 137 - protein, 10 aa, Artificial Sequence
  Synthetically generated peptide
CCCCPACTGC

SEQ ID NO: 138 - protein, 11 aa, Artificial Sequence
  Synthetically generated peptide
CCCCNACTGCY

SEQ ID NO: 139 - protein, 10 aa, Artificial Sequence
  Synthetically generated peptide
CCCCNCTGCY

SEQ ID NO: 140 - protein, 10 aa, Artificial Sequence
  Synthetically generated peptide
CCCCNACGCY

SEQ ID NO: 141 - protein, 10 aa, Artificial Sequence
  Synthetically generated peptide
CCCCNACTCY

SEQ ID NO: 142 - protein, 10 aa, Artificial Sequence
  Synthetically generated peptide
CCCCNACTGC

SEQ ID NO: 143 - protein, 11 aa, Artificial Sequence
  Synthetically generated peptide
CCCCNPCTGCY

SEQ ID NO: 144 - protein, 10 aa, Artificial Sequence
  Synthetically generated peptide
CCCCNPCGCY

SEQ ID NO: 145 - protein, 10 aa, Artificial Sequence
  Synthetically generated peptide
CCCCNPCTCY

SEQ ID NO: 146 - protein, 10 aa, Artificial Sequence
  Synthetically generated peptide
CCCCNPCTGC

SEQ ID NO: 147 - protein, 11 aa, Artificial Sequence
  Synthetically generated peptide
CCCCNPACGCY

SEQ ID NO: 148 - protein, 10 aa, Artificial Sequence
  Synthetically generated peptide
CCCCNPACCY

SEQ ID NO: 149 - protein, 10 aa, Artificial Sequence
  Synthetically generated peptide
CCCCNPACGC

SEQ ID NO: 150 - protein, 11 aa, Artificial Sequence
  Synthetically generated peptide
CCCCNPACTCY

SEQ ID NO: 151 - protein, 10 aa, Artificial Sequence
  Synthetically generated peptide
CCCCNPACTC

SEQ ID NO: 152 - protein, 11 aa, Artificial Sequence
  Synthetically generated peptide
CCCCNPACTGC

SEQ ID NO: 153 - protein, 12 aa, Artificial Sequence
  Synthetically generated peptide
CCYCCPACTGCY

SEQ ID NO: 154 - protein, 11 aa, Artificial Sequence
  Synthetically generated peptide
CCYCCACTGCY

SEQ ID NO: 155 - protein, 10 aa, Artificial Sequence
  Synthetically generated peptide
CCYCCCTGCY

SEQ ID NO: 156 - protein, 10 aa, Artificial Sequence
  Synthetically generated peptide
CCYCCACGCY

SEQ ID NO: 157 - protein, 10 aa, Artificial Sequence
  Synthetically generated peptide
CCYCCACTCY

SEQ ID NO: 158 - protein, 10 aa, Artificial Sequence
  Synthetically generated peptide
CCYCCACTGC

SEQ ID NO: 159 - protein, 11 aa, Artificial Sequence
  Synthetically generated peptide
CCYCCPCTGCY

SEQ ID NO: 160 - protein, 10 aa, Artificial Sequence
  Synthetically generated peptide
CCYCCPCGCY

SEQ ID NO: 161 - protein, 10 aa, Artificial Sequence
  Synthetically generated peptide
CCYCCPCTCY

SEQ ID NO: 162 - protein, 10 aa, Artificial Sequence
  Synthetically generated peptide
CCYCCPCTGC

SEQ ID NO: 163 - protein, 11 aa, Artificial Sequence
  Synthetically generated peptide
CCYCCPACGCY

SEQ ID NO: 164 - protein, 10 aa, Artificial Sequence
  Synthetically generated peptide
CCYCCPACCY

SEQ ID NO: 165 - protein, 10 aa, Artificial Sequence
  Synthetically generated peptide
CCYCCPACGC

SEQ ID NO: 166 - protein, 11 aa, Artificial Sequence
  Synthetically generated peptide
CCYCCPACTCY

SEQ ID NO: 167 - protein, 10 aa, Artificial Sequence
  Synthetically generated peptide
CCYCCPACTC

SEQ ID NO: 168 - protein, 11 aa, Artificial Sequence
  Synthetically generated peptide
CCYCCPACTGC

SEQ ID NO: 169 - protein, 12 aa, Artificial Sequence
  Synthetically generated peptide
CCYCCNACTGCY

SEQ ID NO: 170 - protein, 11 aa, Artificial Sequence
  Synthetically generated peptide
CCYCCNCTGCY

SEQ ID NO: 171 - protein, 10 aa, Artificial Sequence
  Synthetically generated peptide
CCYCCNCGCY

SEQ ID NO: 172 - protein, 10 aa, Artificial Sequence
  Synthetically generated peptide
CCYCCNCTCY

SEQ ID NO: 173 - protein, 10 aa, Artificial Sequence
  Synthetically generated peptide
CCYCCNCTGC

SEQ ID NO: 174 - protein, 11 aa, Artificial Sequence
  Synthetically generated peptide
CCYCCNACGCY

SEQ ID NO: 175 - protein, 10 aa, Artificial Sequence
  Synthetically generated peptide
CCYCCNACCY

SEQ ID NO: 176 - protein, 10 aa, Artificial Sequence
  Synthetically generated peptide
CCYCCNACGC

SEQ ID NO: 177 - protein, 11 aa, Artificial Sequence
  Synthetically generated peptide
CCYCCNACTCY

SEQ ID NO: 178 - protein, 10 aa, Artificial Sequence
  Synthetically generated peptide
CCYCCNACTC

SEQ ID NO: 179 - protein, 11 aa, Artificial Sequence
  Synthetically generated peptide
CCYCCNACTGC

SEQ ID NO: 180 - protein, 12 aa, Artificial Sequence
  Synthetically generated peptide
CCYCCNPCTGCY

SEQ ID NO: 181 - protein, 11 aa, Artificial Sequence
  Synthetically generated peptide
CCYCCNPCGCY

SEQ ID NO: 182 - protein, 10 aa, Artificial Sequence
  Synthetically generated peptide
CCYCCNPCCY

SEQ ID NO: 183 - protein, 10 aa, Artificial Sequence
  Synthetically generated peptide
CCYCCNPCGC

SEQ ID NO: 184 - protein, 11 aa, Artificial Sequence
  Synthetically generated peptide
CCYCCNPCTCY

SEQ ID NO: 185 - protein, 10 aa, Artificial Sequence
  Synthetically generated peptide
CCYCCNPCTC

SEQ ID NO: 186 - protein, 11 aa, Artificial Sequence
  Synthetically generated peptide
CCYCCNPCTGC

SEQ ID NO: 187 - protein, 12 aa, Artificial Sequence
  Synthetically generated peptide
CCYCCNPACGCY

SEQ ID NO: 188 - protein, 11 aa, Artificial Sequence
  Synthetically generated peptide
CCYCCNPACCY

SEQ ID NO: 189 - protein, 10 aa, Artificial Sequence
  Synthetically generated peptide
CCYCCNPACC

SEQ ID NO: 190 - protein, 11 aa, Artificial Sequence
  Synthetically generated peptide
CCYCCNPACGC

SEQ ID NO: 191 - protein, 12 aa, Artificial Sequence
  Synthetically generated peptide
CCYCCNPACTCY

SEQ ID NO: 192 - protein, 11 aa, Artificial Sequence
  Synthetically generated peptide
CCYCCNPACTC

SEQ ID NO: 193 - protein, 12 aa, Artificial Sequence
  Synthetically generated peptide
CCYCCNPACTGC

SEQ ID NO: 194 - protein, 13 aa, Artificial Sequence
  Synthetically generated peptide
CCECCNPACTGCY

SEQ ID NO: 195 - protein, 12 aa, Artificial Sequence
  Synthetically generated peptide
CCECCPACTGCY

SEQ ID NO: 196 - protein, 11 aa, Artificial Sequence
  Synthetically generated peptide
CCECCACTGCY

SEQ ID NO: 197 - protein, 10 aa, Artificial Sequence
  Synthetically generated peptide
CCECCCTGCY

SEQ ID NO: 198 - protein, 10 aa, Artificial Sequence
  Synthetically generated peptide
CCECCACGCY

SEQ ID NO: 199 - protein, 10 aa, Artificial Sequence
  Synthetically generated peptide
CCECCACTCY

SEQ ID NO: 200 - protein, 10 aa, Artificial Sequence
  Synthetically generated peptide
CCECCACTGC

SEQ ID NO: 201 - protein, 11 aa, Artificial Sequence
  Synthetically generated peptide
CCECCPCTGCY

SEQ ID NO: 202 - protein, 10 aa, Artificial Sequence
  Synthetically generated peptide
CCECCPCGCY

SEQ ID NO: 203 - protein, 10 aa, Artificial Sequence
  Synthetically generated peptide
CCECCPCTCY

SEQ ID NO: 204 - protein, 10 aa, Artificial Sequence
  Synthetically generated peptide
CCECCPCTGC

SEQ ID NO: 205 - protein, 11 aa, Artificial Sequence
  Synthetically generated peptide
CCECCPACGCY

SEQ ID NO: 206 - protein, 10 aa, Artificial Sequence
  Synthetically generated peptide
CCECCPACCY

SEQ ID NO: 207 - protein, 10 aa, Artificial Sequence
  Synthetically generated peptide
CCECCPACGC

SEQ ID NO: 208 - protein, 11 aa, Artificial Sequence
  Synthetically generated peptide
CCECCPACTCY

SEQ ID NO: 209 - protein, 10 aa, Artificial Sequence
  Synthetically generated peptide
CCECCPACTC

SEQ ID NO: 210 - protein, 11 aa, Artificial Sequence
  Synthetically generated peptide
CCECCPACTGC

SEQ ID NO: 211 - protein, 12 aa, Artificial Sequence
  Synthetically generated peptide
CCECCNACTGCY

SEQ ID NO: 212 - protein, 11 aa, Artificial Sequence
  Synthetically generated peptide
CCECCNCTGCY

SEQ ID NO: 213 - protein, 10 aa, Artificial Sequence
  Synthetically generated peptide
CCECCNCGCY

SEQ ID NO: 214 - protein, 10 aa, Artificial Sequence
  Synthetically generated peptide
CCECCNCTCY

SEQ ID NO: 215 - protein, 10 aa, Artificial Sequence
  Synthetically generated peptide
CCECCNCTGC

SEQ ID NO: 216 - protein, 11 aa, Artificial Sequence
  Synthetically generated peptide
CCECCNACGCY

SEQ ID NO: 217 - protein, 10 aa, Artificial Sequence
  Synthetically generated peptide
CCECCNACCY

SEQ ID NO: 218 - protein, 10 aa, Artificial Sequence
  Synthetically generated peptide
CCECCNACGC

SEQ ID NO: 219 - protein, 11 aa, Artificial Sequence
  Synthetically generated peptide
CCECCNACTCY

SEQ ID NO: 220 - protein, 10 aa, Artificial Sequence
  Synthetically generated peptide
CCECCNACTC

SEQ ID NO: 221 - protein, 11 aa, Artificial Sequence
  Synthetically generated peptide
CCECCNACTGC

SEQ ID NO: 222 - protein, 12 aa, Artificial Sequence
  Synthetically generated peptide
CCECCNPCTGCY

SEQ ID NO: 223 - protein, 11 aa, Artificial Sequence
  Synthetically generated peptide
CCECCNPCGCY

SEQ ID NO: 224 - protein, 10 aa, Artificial Sequence
  Synthetically generated peptide
CCECCNPCCY

SEQ ID NO: 225 - protein, 10 aa, Artificial Sequence
  Synthetically generated peptide
CCECCNPCGC

SEQ ID NO: 226 - protein, 11 aa, Artificial Sequence
  Synthetically generated peptide
CCECCNPCTCY

SEQ ID NO: 227 - protein, 10 aa, Artificial Sequence
  Synthetically generated peptide
CCECCNPCTC

SEQ ID NO: 228 - protein, 11 aa, Artificial Sequence
  Synthetically generated peptide
CCECCNPCTGC

SEQ ID NO: 229 - protein, 12 aa, Artificial Sequence
  Synthetically generated peptide
CCECCNPACGCY

SEQ ID NO: 230 - protein, 11 aa, Artificial Sequence
  Synthetically generated peptide
CCECCNPACCY

SEQ ID NO: 231 - protein, 10 aa, Artificial Sequence
  Synthetically generated peptide
CCECCNPACC

SEQ ID NO: 232 - protein, 11 aa, Artificial Sequence
  Synthetically generated peptide
CCECCNPACGC

SEQ ID NO: 233 - protein, 12 aa, Artificial Sequence
  Synthetically generated peptide
CCECCNPACTCY

SEQ ID NO: 234 - protein, 11 aa, Artificial Sequence
  Synthetically generated peptide
CCECCNPACTC

SEQ ID NO: 235 - protein, 12 aa, Artificial Sequence
  Synthetically generated peptide
CCECCNPACTGC

SEQ ID NO: 236 - protein, 13 aa, Artificial Sequence
  Synthetically generated peptide
CCEYCCPACTGCY

SEQ ID NO: 237 - protein, 12 aa, Artificial Sequence
  Synthetically generated peptide
CCEYCCACTGCY

SEQ ID NO: 238 - protein, 11 aa, Artificial Sequence
  Synthetically generated peptide
CCEYCCCTGCY

SEQ ID NO: 239 - protein, 10 aa, Artificial Sequence
  Synthetically generated peptide
CCEYCCCGCY

SEQ ID NO: 240 - protein, 10 aa, Artificial Sequence
  Synthetically generated peptide
CCEYCCCTCY

SEQ ID NO: 241 - protein, 10 aa, Artificial Sequence
  Synthetically generated peptide
CCEYCCCTGC

SEQ ID NO: 242 - protein, 11 aa, Artificial Sequence
  Synthetically generated peptide
CCEYCCACGCY

SEQ ID NO: 243 - protein, 10 aa, Artificial Sequence
  Synthetically generated peptide
CCEYCCACCY

SEQ ID NO: 244 - protein, 10 aa, Artificial Sequence
  Synthetically generated peptide
CCEYCCACGC

SEQ ID NO: 245 - protein, 11 aa, Artificial Sequence
  Synthetically generated peptide
CCEYCCACTCY

SEQ ID NO: 246 - protein, 10 aa, Artificial Sequence
  Synthetically generated peptide
CCEYCCACTC

SEQ ID NO: 247 - protein, 11 aa, Artificial Sequence
  Synthetically generated peptide
CCEYCCACTGC

SEQ ID NO: 248 - protein, 12 aa, Artificial Sequence
  Synthetically generated peptide
CCEYCCPCTGCY

SEQ ID NO: 249 - protein, 11 aa, Artificial Sequence
  Synthetically generated peptide
CCEYCCPCGCY

SEQ ID NO: 250 - protein, 10 aa, Artificial Sequence
  Synthetically generated peptide
CCEYCCPCCY

SEQ ID NO: 251 - protein, 10 aa, Artificial Sequence
  Synthetically generated peptide
CCEYCCPCGC

SEQ ID NO: 252 - protein, 11 aa, Artificial Sequence
  Synthetically generated peptide
CCEYCCPCTCY

SEQ ID NO: 253 - protein, 10 aa, Artificial Sequence
  Synthetically generated peptide
CCEYCCPCTC

SEQ ID NO: 254 - protein, 11 aa, Artificial Sequence
  Synthetically generated peptide
CCEYCCPCTGC

SEQ ID NO: 255 - protein, 12 aa, Artificial Sequence
  Synthetically generated peptide
CCEYCCPACGCY

SEQ ID NO: 256 - protein, 11 aa, Artificial Sequence
  Synthetically generated peptide
CCEYCCPACCY

SEQ ID NO: 257 - protein, 10 aa, Artificial Sequence
  Synthetically generated peptide
CCEYCCPACC

SEQ ID NO: 258 - protein, 11 aa, Artificial Sequence
  Synthetically generated peptide
CCEYCCPACGC

SEQ ID NO: 259 - protein, 12 aa, Artificial Sequence
  Synthetically generated peptide
CCEYCCPACTCY

SEQ ID NO: 260 - protein, 11 aa, Artificial Sequence
  Synthetically generated peptide
CCEYCCPACTC

SEQ ID NO: 261 - protein, 12 aa, Artificial Sequence
  Synthetically generated peptide
CCEYCCPACTGC

SEQ ID NO: 262 - protein, 13 aa, Artificial Sequence
  Synthetically generated peptide
CCEYCCNACTGCY

SEQ ID NO: 263 - protein, 12 aa, Artificial Sequence
  Synthetically generated peptide
CCEYCCNCTGCY

SEQ ID NO: 264 - protein, 11 aa, Artificial Sequence
  Synthetically generated peptide
CCEYCCNCGCY

SEQ ID NO: 265 - protein, 10 aa, Artificial Sequence
  Synthetically generated peptide
CCEYCCNCCY

SEQ ID NO: 266 - protein, 10 aa, Artificial Sequence
  Synthetically generated peptide
CCEYCCNCGC

SEQ ID NO: 267 - protein, 11 aa, Artificial Sequence
  Synthetically generated peptide
CCEYCCNCTCY

SEQ ID NO: 268 - protein, 10 aa, Artificial Sequence
  Synthetically generated peptide
CCEYCCNCTC

SEQ ID NO: 269 - protein, 11 aa, Artificial Sequence
  Synthetically generated peptide
CCEYCCNCTGC

SEQ ID NO: 270 - protein, 12 aa, Artificial Sequence
  Synthetically generated peptide
CCEYCCNACGCY

SEQ ID NO: 271 - protein, 11 aa, Artificial Sequence
  Synthetically generated peptide
CCEYCCNACCY

SEQ ID NO: 272 - protein, 10 aa, Artificial Sequence
  Synthetically generated peptide
CCEYCCNACC

SEQ ID NO: 273 - protein, 11 aa, Artificial Sequence
  Synthetically generated peptide
CCEYCCNACGC

SEQ ID NO: 274 - protein, 12 aa, Artificial Sequence
  Synthetically generated peptide
CCEYCCNACTCY

SEQ ID NO: 275 - protein, 11 aa, Artificial Sequence
  Synthetically generated peptide
CCEYCCNACTC

SEQ ID NO: 276 - protein, 12 aa, Artificial Sequence
  Synthetically generated peptide
CCEYCCNACTGC

SEQ ID NO: 277 - protein, 13 aa, Artificial Sequence
  Synthetically generated peptide
CCEYCCNPCTGCY

SEQ ID NO: 278 - protein, 12 aa, Artificial Sequence
  Synthetically generated peptide
CCEYCCNPCGCY

SEQ ID NO: 279 - protein, 11 aa, Artificial Sequence
  Synthetically generated peptide
CCEYCCNPCCY

SEQ ID NO: 280 - protein, 10 aa, Artificial Sequence
  Synthetically generated peptide
CCEYCCNPCC

SEQ ID NO: 281 - protein, 11 aa, Artificial Sequence
  Synthetically generated peptide
CCEYCCNPCGC

SEQ ID NO: 282 - protein, 12 aa, Artificial Sequence
  Synthetically generated peptide
CCEYCCNPCTCY

SEQ ID NO: 283 - protein, 11 aa, Artificial Sequence
  Synthetically generated peptide
CCEYCCNPCTC

SEQ ID NO: 284 - protein, 12 aa, Artificial Sequence
  Synthetically generated peptide
CCEYCCNPCTGC

SEQ ID NO: 285 - protein, 13 aa, Artificial Sequence
  Synthetically generated peptide
CCEYCCNPACGCY

SEQ ID NO: 286 - protein, 12 aa, Artificial Sequence
  Synthetically generated peptide
CCEYCCNPACCY

SEQ ID NO: 287 - protein, 11 aa, Artificial Sequence
  Synthetically generated peptide
CCEYCCNPACC

SEQ ID NO: 288 - protein, 12 aa, Artificial Sequence
  Synthetically generated peptide
CCEYCCNPACGC

SEQ ID NO: 289 - protein, 13 aa, Artificial Sequence
  Synthetically generated peptide
CCEYCCNPACTCY

SEQ ID NO: 290 - protein, 12 aa, Artificial Sequence
  Synthetically generated peptide
CCEYCCNPACTC

SEQ ID NO: 291 - protein, 13 aa, Artificial Sequence
  Synthetically generated peptide
CCEYCCNPACTGC

SEQ ID NO: 292 - protein, 13 aa, Artificial Sequence
  Synthetically generated peptide
  VARIANT (1)..(1): Xaa = Any Amino Acid
XEYCCNPACTGCY

SEQ ID NO: 293 - protein, 16 aa, Artificial Sequence
  Synthetically generated peptide
  VARIANT (3)..(4): Xaa = Any Amino Acid
CCXXEYCCNPACTGCY

SEQ ID NO: 294 - protein, 17 aa, Artificial Sequence
  Synthetically generated peptide
  VARIANT (3)..(4): Xaa = Any Amino Acid
  misc_feature (5)..(5): Xaa can be any naturally occurring amino acid
CCXXXEYCCNPACTGCY

SEQ ID NO: 295 - protein, 18 aa, Artificial Sequence
  Synthetically generated peptide
  VARIANT (3)..(4): Xaa = Any Amino Acid
  misc_feature (5)..(6): Xaa can be any naturally occurring amino acid
CCXXXXEYCCNPACTGCY

SEQ ID NO: 296 - protein, 18 aa, Artificial Sequence
  Synthetically generated peptide
  VARIANT (3)..(4): Xaa = Any Amino Acid
  misc_feature (5)..(5): Xaa can be any naturally occurring amino acid
  misc_feature (7)..(7): Xaa can be any naturally occurring amino acid
CCXXXEXYCCNPACTGCY

SEQ ID NO: 297 - protein, 18 aa, Artificial Sequence
  Synthetically generated peptide
  VARIANT (3)..(4): Xaa = Any Amino Acid
  misc_feature (5)..(5): Xaa can be any naturally occurring amino acid
  misc_feature (8)..(8): Xaa can be any naturally occurring amino acid
CCXXXEYXCCNPACTGCY

SEQ ID NO: 298 - protein, 18 aa, Artificial Sequence
  Synthetically generated peptide
  VARIANT (3)..(4): Xaa = Any Amino Acid
  misc_feature (5)..(5): Xaa can be any naturally occurring amino acid
  misc_feature (10)..(10): Xaa can be any naturally occurring amino acid
CCXXXEYCCXNPACTGCY

SEQ ID NO: 299 - protein, 18 aa, Artificial Sequence
  Synthetically generated peptide
  VARIANT (3)..(4): Xaa = Any Amino Acid
  misc_feature (5)..(5): Xaa can be any naturally occurring amino acid
  misc_feature (11)..(11): Xaa can be any naturally occurring amino acid
CCXXXEYCCNXPACTGCY

SEQ ID NO: 300 - protein, 18 aa, Artificial Sequence
  Synthetically generated peptide
  VARIANT (3)..(4): Xaa = Any Amino Acid
  misc_feature (5)..(5): Xaa can be any naturally occurring amino acid
  misc_feature (12)..(12): Xaa can be any naturally occurring amino acid
CCXXXEYCCNPXACTGCY

SEQ ID NO: 301 - protein, 18 aa, Artificial Sequence
  Synthetically generated peptide
  VARIANT (3)..(4): Xaa = Any Amino Acid
  misc_feature (5)..(5): Xaa can be any naturally occurring amino acid
  misc_feature (13)..(13): Xaa can be any naturally occurring amino acid
CCXXXEYCCNPAXCTGCY

SEQ ID NO: 302 - protein, 18 aa, Artificial Sequence
  Synthetically generated peptide
  VARIANT (3)..(4): Xaa = Any Amino Acid
  misc_feature (5)..(5): Xaa can be any naturally occurring amino acid
  misc_feature (14)..(14): Xaa can be any naturally occurring amino acid
CCXXXEYCCNPACXTGCY

SEQ ID NO: 303 - protein, 18 aa, Artificial Sequence
  Synthetically generated peptide
  VARIANT (3)..(4): Xaa = Any Amino Acid
  misc_feature (5)..(5): Xaa can be any naturally occurring amino acid
  misc_feature (15)..(15): Xaa can be any naturally occurring amino acid
CCXXXEYCCNPACTXGCY

SEQ ID NO: 304 - protein, 18 aa, Artificial Sequence
  Synthetically generated peptide
  VARIANT (3)..(4): Xaa = Any Amino Acid
  misc_feature (5)..(5): Xaa can be any naturally occurring amino acid
  misc_feature (16)..(16): Xaa can be any naturally occurring amino acid
CCXXXEYCCNPACTGXCY

SEQ ID NO: 305 - protein, 18 aa, Artificial Sequence
  Synthetically generated peptide
  VARIANT (3)..(4): Xaa = Any Amino Acid
  misc_feature (5)..(5): Xaa can be any naturally occurring amino acid
  misc_feature (17)..(17): Xaa can be any naturally occurring amino acid
CCXXXEYCCNPACTGCXY

SEQ ID NO: 306 - protein, 17 aa, Artificial Sequence
  Synthetically generated peptide
  VARIANT (3)..(4): Xaa = Any Amino Acid
  misc_feature (6)..(6): Xaa can be any naturally occurring amino acid
CCXXEXYCCNPACTGCY

SEQ ID NO: 307 - protein, 18 aa, Artificial Sequence
  Synthetically generated peptide
  VARIANT (3)..(4): Xaa = Any Amino Acid
  misc_feature (6)..(7): Xaa can be any naturally occurring amino acid
CCXXEXXYCCNPACTGCY

SEQ ID NO: 308 - protein, 18 aa, Artificial Sequence
  Synthetically generated peptide
  VARIANT (3)..(4): Xaa = Any Amino Acid
  misc_feature (6)..(6): Xaa can be any naturally occurring amino acid
  misc_feature (8)..(8): Xaa can be any naturally occurring amino acid
CCXXEXYXCCNPACTGCY

SEQ ID NO: 309 - protein, 18 aa, Artificial Sequence
  Synthetically generated peptide
  VARIANT (3)..(4): Xaa = Any Amino Acid
  misc_feature (6)..(6): Xaa can be any naturally occurring amino acid
  misc_feature (10)..(10): Xaa can be any naturally occurring amino acid
CCXXEXYCCXNPACTGCY

SEQ ID NO: 310 - protein, 18 aa, Artificial Sequence
  Synthetically generated peptide
  VARIANT (3)..(4): Xaa = Any Amino Acid
  misc_feature (6)..(6): Xaa can be any naturally occurring amino acid
  misc_feature (11)..(11): Xaa can be any naturally occurring amino acid
CCXXEXYCCNXPACTGCY

SEQ ID NO: 311 - protein, 18 aa, Artificial Sequence
  Synthetically generated peptide
  VARIANT (3)..(4): Xaa = Any Amino Acid
  misc_feature (6)..(6): Xaa can be any naturally occurring amino acid
  misc_feature (12)..(12): Xaa can be any naturally occurring amino acid
CCXXEXYCCNPXACTGCY

SEQ ID NO: 312 - protein, 18 aa, Artificial Sequence
  Synthetically generated peptide
  VARIANT (3)..(4): Xaa = Any Amino Acid
  misc_feature (6)..(6): Xaa can be any naturally occurring amino acid
  misc_feature (13)..(13): Xaa can be any naturally occurring amino acid
CCXXEXYCCNPAXCTGCY

SEQ ID NO: 313 - protein, 18 aa, Artificial Sequence
  Synthetically generated peptide
  VARIANT (3)..(4): Xaa = Any Amino Acid
  misc_feature (6)..(6): Xaa can be any naturally occurring amino acid
  misc_feature (14)..(14): Xaa can be any naturally occurring amino acid
CCXXEXYCCNPACXTGCY

SEQ ID NO: 314 - protein, 18 aa, Artificial Sequence
  Synthetically generated peptide
  VARIANT (3)..(4): Xaa = Any Amino Acid
  misc_feature (6)..(6): Xaa can be any naturally occurring amino acid
  misc_feature (15)..(15): Xaa can be any naturally occurring amino acid
CCXXEXYCCNPACTXGCY

SEQ ID NO: 315 - protein, 18 aa, Artificial Sequence
  Synthetically generated peptide
  VARIANT (3)..(4): Xaa = Any Amino Acid
  misc_feature (6)..(6): Xaa can be any naturally occurring amino acid
  misc_feature (16)..(16): Xaa can be any naturally occurring amino acid
CCXXEXYCCNPACTGXCY

SEQ ID NO: 316 - protein, 18 aa, Artificial Sequence
  Synthetically generated peptide
  VARIANT (3)..(4): Xaa = Any Amino Acid
  misc_feature (6)..(6): Xaa can be any naturally occurring amino acid
  misc_feature (17)..(17): Xaa can be any naturally occurring amino acid
CCXXEXYCCNPACTGCXY

SEQ ID NO: 317 - protein, 17 aa, Artificial Sequence
  Synthetically generated peptide
  VARIANT (3)..(4): Xaa = Any Amino Acid
  misc_feature (7)..(7): Xaa can be any naturally occurring amino acid
CCXXEYXCCNPACTGCY

SEQ ID NO: 318 - protein, 18 aa, Artificial Sequence
  Synthetically generated peptide
  VARIANT (3)..(4): Xaa = Any Amino Acid
  misc_feature (7)..(8): Xaa can be any naturally occurring amino acid
CCXXEYXXCCNPACTGCY

SEQ ID NO: 319 - protein, 18 aa, Artificial Sequence
  Synthetically generated peptide
  VARIANT (3)..(4): Xaa = Any Amino Acid
  misc_feature (7)..(7): Xaa can be any naturally occurring amino acid
  misc_feature (10)..(10): Xaa can be any naturally occurring amino acid
CCXXEYXCCXNPACTGCY

SEQ ID NO: 320 - protein, 18 aa, Artificial Sequence
  Synthetically generated peptide
  VARIANT (3)..(4): Xaa = Any Amino Acid
  misc_feature (7)..(7): Xaa can be any naturally occurring amino acid
  misc_feature (11)..(11): Xaa can be any naturally occurring amino acid
CCXXEYXCCNXPACTGCY

SEQ ID NO: 321 - protein, 18 aa, Artificial Sequence
  Synthetically generated peptide
  VARIANT (3)..(4): Xaa = Any Amino Acid
  misc_feature (7)..(7): Xaa can be any naturally occurring amino acid
  misc_feature (12)..(12): Xaa can be any naturally occurring amino acid
CCXXEYXCCNPXACTGCY

SEQ ID NO: 322 - protein, 18 aa, Artificial Sequence
  Synthetically generated peptide
  VARIANT (3)..(4): Xaa = Any Amino Acid
  misc_feature (7)..(7): Xaa can be any naturally occurring amino acid
  misc_feature (13)..(13): Xaa can be any naturally occurring amino acid
CCXXEYXCCNPAXCTGCY

SEQ ID NO: 323 - protein, 18 aa, Artificial Sequence
  Synthetically generated peptide
  VARIANT (3)..(4): Xaa = Any Amino Acid
  misc_feature (7)..(7): Xaa can be any naturally occurring amino acid
  misc_feature (14)..(14): Xaa can be any naturally occurring amino acid
CCXXEYXCCNPACXTGCY

SEQ ID NO: 324 - protein, 18 aa, Artificial Sequence
  Synthetically generated peptide
  VARIANT (3)..(4): Xaa = Any Amino Acid
  misc_feature (7)..(7): Xaa can be any naturally occurring amino acid
  misc_feature (15)..(15): Xaa can be any naturally occurring amino acid
CCXXEYXCCNPACTXGCY

SEQ ID NO: 325 - protein, 18 aa, Artificial Sequence
  Synthetically generated peptide
  VARIANT (3)..(4): Xaa = Any Amino Acid
  misc_feature (7)..(7): Xaa can be any naturally occurring amino acid
  misc_feature (16)..(16): Xaa can be any naturally occurring amino acid
CCXXEYXCCNPACTGXCY

SEQ ID NO: 326 - protein, 18 aa, Artificial Sequence
  Synthetically generated peptide
  VARIANT (3)..(4): Xaa = Any Amino Acid
  misc_feature (7)..(7): Xaa can be any naturally occurring amino acid
  misc_feature (17)..(17): Xaa can be any naturally occurring amino acid
CCXXEYXCCNPACTGCXY

SEQ ID NO: 327 - protein, 17 aa, Artificial Sequence
  Synthetically generated peptide
  VARIANT (3)..(4): Xaa = Any Amino Acid
  misc_feature (9)..(9): Xaa can be any naturally occurring amino acid
CCXXEYCCXNPACTGCY

SEQ ID NO: 328 - protein, 18 aa, Artificial Sequence
  Synthetically generated peptide
  VARIANT (3)..(4): Xaa = Any Amino Acid
  misc_feature (9)..(10): Xaa can be any naturally occurring amino acid
CCXXEYCCXXNPACTGCY

SEQ ID NO: 329 - protein, 18 aa, Artificial Sequence
  Synthetically generated peptide
  VARIANT (3)..(4): Xaa = Any Amino Acid
  misc_feature (9)..(9): Xaa can be any naturally occurring amino acid
  misc_feature (11)..(11): Xaa can be any naturally occurring amino acid
CCXXEYCCXNXPACTGCY

SEQ ID NO: 330 - protein, 18 aa, Artificial Sequence
  Synthetically generated peptide
  VARIANT (3)..(4): Xaa = Any Amino Acid
  misc_feature (9)..(9): Xaa can be any naturally occurring amino acid
  misc_feature (12)..(12): Xaa can be any naturally occurring amino acid
CCXXEYCCXNPXACTGCY

SEQ ID NO: 331 - protein, 18 aa, Artificial Sequence
  Synthetically generated peptide
  VARIANT (3)..(4): Xaa = Any Amino Acid
  misc_feature (9)..(9): Xaa can be any naturally occurring amino acid
  misc_feature (13)..(13): Xaa can be any naturally occurring amino acid
CCXXEYCCXNPAXCTGCY

SEQ ID NO: 332 - protein, 18 aa, Artificial Sequence
  Synthetically generated peptide
  VARIANT (3)..(4): Xaa = Any Amino Acid
  misc_feature (9)..(9): Xaa can be any naturally occurring amino acid
  misc_feature (14)..(14): Xaa can be any naturally occurring amino acid
CCXXEYCCXNPACXTGCY

SEQ ID NO: 333 - protein, 18 aa, Artificial Sequence
  Synthetically generated peptide
  VARIANT (3)..(4): Xaa = Any Amino Acid
  misc_feature (9)..(9): Xaa can be any naturally occurring amino acid
  misc_feature (15)..(15): Xaa can be any naturally occurring amino acid
CCXXEYCCXNPACTXGCY

SEQ ID NO: 334 - protein, 18 aa, Artificial Sequence
  Synthetically generated peptide
  VARIANT (3)..(4): Xaa = Any Amino Acid
  misc_feature (9)..(9): Xaa can be any naturally occurring amino acid
  misc_feature (16)..(16): Xaa can be any naturally occurring amino acid
CCXXEYCCXNPACTGXCY

SEQ ID NO: 335 - protein, 18 aa, Artificial Sequence
  Synthetically generated peptide
  VARIANT (3)..(4): Xaa = Any Amino Acid
  misc_feature (9)..(9): Xaa can be any naturally occurring amino acid
  misc_feature (17)..(17): Xaa can be any naturally occurring amino acid
CCXXEYCCXNPACTGCXY

SEQ ID NO: 336 - protein, 17 aa, Artificial Sequence
  Synthetically generated peptide
  VARIANT (3)..(4): Xaa = Any Amino Acid
  misc_feature (10)..(10): Xaa can be any naturally occurring amino acid
CCXXEYCCNXPACTGCY

SEQ ID NO: 337 - protein, 18 aa, Artificial Sequence
  Synthetically generated peptide
  VARIANT (3)..(4): Xaa = Any Amino Acid
  misc_feature (10)..(11): Xaa can be any naturally occurring amino acid
CCXXEYCCNXXPACTGCY

SEQ ID NO: 338 - protein, 18 aa, Artificial Sequence
  Synthetically generated peptide
  VARIANT (3)..(4): Xaa = Any Amino Acid
  misc_feature (10)..(10): Xaa can be any naturally occurring amino acid
  misc_feature (12)..(12): Xaa can be any naturally occurring amino acid
CCXXEYCCNXPXACTGCY

SEQ ID NO: 339 - protein, 18 aa, Artificial Sequence
  Synthetically generated peptide
  VARIANT (3)..(4): Xaa = Any Amino Acid
  misc_feature (10)..(10): Xaa can be any naturally occurring amino acid
  misc_feature (13)..(13): Xaa can be any naturally occurring amino acid
CCXXEYCCNXPAXCTGCY

SEQ ID NO: 340 - protein, 18 aa, Artificial Sequence
  Synthetically generated peptide
  VARIANT (3)..(4): Xaa = Any Amino Acid
  misc_feature (10)..(10): Xaa can be any naturally occurring amino acid
  misc_feature (14)..(14): Xaa can be any naturally occurring amino acid
CCXXEYCCNXPACXTGCY

SEQ ID NO: 341 - protein, 18 aa, Artificial Sequence
  Synthetically generated peptide
  VARIANT (3)..(4): Xaa = Any Amino Acid
  misc_feature (10)..(10): Xaa can be any naturally occurring amino acid
  misc_feature (15)..(15): Xaa can be any naturally occurring amino acid
CCXXEYCCNXPACTXGCY

SEQ ID NO: 342 - protein, 18 aa, Artificial Sequence
  Synthetically generated peptide
  VARIANT (3)..(4): Xaa = Any Amino Acid
  misc_feature (10)..(10): Xaa can be any naturally occurring amino acid
  misc_feature (16)..(16): Xaa can be any naturally occurring amino acid
CCXXEYCCNXPACTGXCY

SEQ ID NO: 343 - protein, 18 aa, Artificial Sequence
  Synthetically generated peptide
  VARIANT (3)..(4): Xaa = Any Amino Acid
  misc_feature (10)..(10): Xaa can be any naturally occurring amino acid
  misc_feature (17)..(17): Xaa can be any naturally occurring amino acid
CCXXEYCCNXPACTGCXY

SEQ ID NO: 344 - protein, 17 aa, Artificial Sequence
  Synthetically generated peptide
  VARIANT (3)..(4): Xaa = Any Amino Acid
  misc_feature (11)..(11): Xaa can be any naturally occurring amino acid
CCXXEYCCNPXACTGCY

SEQ ID NO: 345 - protein, 18 aa, Artificial Sequence
  Synthetically generated peptide
  VARIANT (3)..(4): Xaa = Any Amino Acid
  misc_feature (11)..(12): Xaa can be any naturally occurring amino acid
CCXXEYCCNPXXACTGCY

SEQ ID NO: 346 - protein, 18 aa, Artificial Sequence
  Synthetically generated peptide
  VARIANT (3)..(4): Xaa = Any Amino Acid
  misc_feature (11)..(11): Xaa can be any naturally occurring amino acid
  misc_feature (13)..(13): Xaa can be any naturally occurring amino acid
CCXXEYCCNPXAXCTGCY

SEQ ID NO: 347 - protein, 18 aa, Artificial Sequence
  Synthetically generated peptide
  VARIANT (3)..(4): Xaa = Any Amino Acid
  misc_feature (11)..(11): Xaa can be any naturally occurring amino acid
  misc_feature (14)..(14): Xaa can be any naturally occurring amino acid
CCXXEYCCNPXACXTGCY

SEQ ID NO: 348 - protein, 18 aa, Artificial Sequence
  Synthetically generated peptide
  VARIANT (3)..(4): Xaa = Any Amino Acid
  misc_feature (11)..(11): Xaa can be any naturally occurring amino acid
  misc_feature (15)..(15): Xaa can be any naturally occurring amino acid
CCXXEYCCNPXACTXGCY

SEQ ID NO: 349 - protein, 18 aa, Artificial Sequence
  Synthetically generated peptide
  VARIANT (3)..(4): Xaa = Any Amino Acid
  misc_feature (11)..(11): Xaa can be any naturally occurring amino acid
  misc_feature (16)..(16): Xaa can be any naturally occurring amino acid
CCXXEYCCNPXACTGXCY

SEQ ID NO: 350 - protein, 18 aa, Artificial Sequence
  Synthetically generated peptide
  VARIANT (3)..(4): Xaa = Any Amino Acid
  misc_feature (11)..(11): Xaa can be any naturally occurring amino acid
  misc_feature (17)..(17): Xaa can be any naturally occurring amino acid
CCXXEYCCNPXACTGCXY

SEQ ID NO: 351 - protein, 17 aa, Artificial Sequence
  Synthetically generated peptide
  VARIANT (3)..(4): Xaa = Any Amino Acid
  misc_feature (12)..(12): Xaa can be any naturally occurring amino acid
CCXXEYCCNPAXCTGCY

SEQ ID NO: 352 - protein, 18 aa, Artificial Sequence
  Synthetically generated peptide
  VARIANT (3)..(4): Xaa = Any Amino Acid
  misc_feature (12)..(13): Xaa can be any naturally occurring amino acid
CCXXEYCCNPAXXCTGCY

SEQ ID NO: 353 - protein, 18 aa, Artificial Sequence
  Synthetically generated peptide
  VARIANT (3)..(4): Xaa = Any Amino Acid
  misc_feature (12)..(12): Xaa can be any naturally occurring amino acid
  misc_feature (14)..(14): Xaa can be any naturally occurring amino acid
CCXXEYCCNPAXCXTGCY

SEQ ID NO: 354 - protein, 18 aa, Artificial Sequence
  Synthetically generated peptide
  VARIANT (3)..(4): Xaa = Any Amino Acid
  misc_feature (12)..(12): Xaa can be any naturally occurring amino acid
  misc_feature (15)..(15): Xaa can be any naturally occurring amino acid
CCXXEYCCNPAXCTXGCY

SEQ ID NO: 355 - protein, 18 aa, Artificial Sequence
  Synthetically generated peptide
  VARIANT (3)..(4): Xaa = Any Amino Acid
  misc_feature (12)..(12): Xaa can be any naturally occurring amino acid
  misc_feature (16)..(16): Xaa can be any naturally occurring amino acid
CCXXEYCCNPAXCTGXCY

SEQ ID NO: 356 - protein, 18 aa, Artificial Sequence
  Synthetically generated peptide
  VARIANT (3)..(4): Xaa = Any Amino Acid
  misc_feature (12)..(12): Xaa can be any naturally occurring amino acid
  misc_feature (17)..(17): Xaa can be any naturally occurring amino acid
CCXXEYCCNPAXCTGCXY

SEQ ID NO: 357 - protein, 17 aa, Artificial Sequence
  Synthetically generated peptide
  VARIANT (3)..(4): Xaa = Any Amino Acid
  misc_feature (13)..(13): Xaa can be any naturally occurring amino acid
CCXXEYCCNPACXTGCY

SEQ ID NO: 358 - protein, 18 aa, Artificial Sequence
  Synthetically generated peptide
  VARIANT (3)..(4): Xaa = Any Amino Acid
  misc_feature (13)..(14): Xaa can be any naturally occurring amino acid
CCXXEYCCNPACXXTGCY

SEQ ID NO: 359 - protein, 18 aa, Artificial Sequence
  Synthetically generated peptide
  VARIANT (3)..(4): Xaa = Any Amino Acid
  misc_feature (13)..(13): Xaa can be any naturally occurring amino acid
  misc_feature (15)..(15): Xaa can be any naturally occurring amino acid
CCXXEYCCNPACXTXGCY

SEQ ID NO: 360 - protein, 18 aa, Artificial Sequence
  Synthetically generated peptide
  VARIANT (3)..(4): Xaa = Any Amino Acid
  misc_feature (13)..(13): Xaa can be any naturally occurring amino acid
  misc_feature (16)..(16): Xaa can be any naturally occurring amino acid
CCXXEYCCNPACXTGXCY

SEQ ID NO: 361 - protein, 18 aa, Artificial Sequence
  Synthetically generated peptide
  VARIANT (3)..(4): Xaa = Any Amino Acid
  misc_feature (13)..(13): Xaa can be any naturally occurring amino acid
  misc_feature (17)..(17): Xaa can be any naturally occurring amino acid
CCXXEYCCNPACXTGCXY

SEQ ID NO: 362 - protein, 17 aa, Artificial Sequence
  Synthetically generated peptide
  VARIANT (3)..(4): Xaa = Any Amino Acid
  misc_feature (14)..(14): Xaa can be any naturally occurring amino acid
CCXXEYCCNPACTXGCY

SEQ ID NO: 363 - protein, 18 aa, Artificial Sequence
  Synthetically generated peptide
  VARIANT (3)..(4): Xaa = Any Amino Acid
  misc_feature (14)..(15): Xaa can be any naturally occurring amino acid
CCXXEYCCNPACTXXGCY

SEQ ID NO: 364 - protein, 18 aa, Artificial Sequence
  Synthetically generated peptide
  VARIANT (3)..(4): Xaa = Any Amino Acid
  misc_feature (14)..(14): Xaa can be any naturally occurring amino acid
  misc_feature (16)..(16): Xaa can be any naturally occurring amino acid
CCXXEYCCNPACTXGXCY

SEQ ID NO: 365 - protein, 18 aa, Artificial Sequence
  Synthetically generated peptide
  VARIANT (3)..(4): Xaa = Any Amino Acid
  misc_feature (14)..(14): Xaa can be any naturally occurring amino acid
  misc_feature (17)..(17): Xaa can be any naturally occurring amino acid
CCXXEYCCNPACTXGCXY

SEQ ID NO: 366 - protein, 17 aa, Artificial Sequence
  Synthetically generated peptide
  VARIANT (3)..(4): Xaa = Any Amino Acid
  misc_feature (15)..(15): Xaa can be any naturally occurring amino acid
CCXXEYCCNPACTGXCY

SEQ ID NO: 367 - protein, 18 aa, Artificial Sequence
  Synthetically generated peptide
  VARIANT (3)..(4): Xaa = Any Amino Acid
  misc_feature (15)..(16): Xaa can be any naturally occurring amino acid
CCXXEYCCNPACTGXXCY

SEQ ID NO: 368 - protein, 18 aa, Artificial Sequence
  Synthetically generated peptide
  VARIANT (3)..(4): Xaa = Any Amino Acid
  misc_feature (15)..(15): Xaa can be any naturally occurring amino acid
  misc_feature (17)..(17): Xaa can be any naturally occurring amino acid
CCXXEYCCNPACTGXCXY

SEQ ID NO: 369 - protein, 17 aa, Artificial Sequence
  Synthetically generated peptide
  VARIANT (3)..(4): Xaa = Any Amino Acid
  misc_feature (16)..(16): Xaa can be any naturally occurring amino acid
CCXXEYCCNPACTGCXY

SEQ ID NO: 370 - protein, 18 aa, Artificial Sequence
  Synthetically generated peptide
  VARIANT (3)..(4): Xaa = Any Amino Acid
  misc_feature (16)..(17): Xaa can be any naturally occurring amino acid
CCXXEYCCNPACTGCXXY

SEQ ID NO: 371 - protein, 16 aa, Artificial Sequence
  Synthetically generated peptide
  VARIANT (3)..(5): Xaa = Any Amino Acid
CCXEXYCCNPACTGCY

SEQ ID NO: 372 - protein, 17 aa, Artificial Sequence
  Synthetically generated peptide
  VARIANT (3)..(5): Xaa = Any Amino Acid
  misc_feature (6)..(6): Xaa can be any naturally occurring amino acid
CCXEXXYCCNPACTGCY

SEQ ID NO: 373 - protein, 18 aa, Artificial Sequence
  Synthetically generated peptide
  VARIANT (3)..(5): Xaa = Any Amino Acid
  misc_feature (6)..(7): Xaa can be any naturally occurring amino acid
CCXEXXXYCCNPACTGCY

SEQ ID NO: 374 - protein, 18 aa, Artificial Sequence
  Synthetically generated peptide
  VARIANT (3)..(5): Xaa = Any Amino Acid
  misc_feature (6)..(6): Xaa can be any naturally occurring amino acid
  misc_feature (8)..(8): Xaa can be any naturally occurring amino acid
CCXEXXYXCCNPACTGCY

SEQ ID NO: 375 - protein, 18 aa, Artificial Sequence
  Synthetically generated peptide
  VARIANT (3)..(5): Xaa = Any Amino Acid
  misc_feature (6)..(6): Xaa can be any naturally occurring amino acid
  misc_feature (10)..(10): Xaa can be any naturally occurring amino acid
CCXEXXYCCXNPACTGCY

SEQ ID NO: 376 - protein, 18 aa, Artificial Sequence
  Synthetically generated peptide
  VARIANT (3)..(5): Xaa = Any Amino Acid
  misc_feature (6)..(6): Xaa can be any naturally occurring amino acid
  misc_feature (11)..(11): Xaa can be any naturally occurring amino acid
CCXEXXYCCNXPACTGCY

SEQ ID NO: 377 - protein, 18 aa, Artificial Sequence
  Synthetically generated peptide
  VARIANT (3)..(5): Xaa = Any Amino Acid
  misc_feature (6)..(6): Xaa can be any naturally occurring amino acid
  misc_feature (12)..(12): Xaa can be any naturally occurring amino acid
CCXEXXYCCNPXACTGCY

SEQ ID NO: 378 - protein, 18 aa, Artificial Sequence
  Synthetically generated peptide
  VARIANT (3)..(5): Xaa = Any Amino Acid
  misc_feature (6)..(6): Xaa can be any naturally occurring amino acid
  misc_feature (13)..(13): Xaa can be any naturally occurring amino acid
CCXEXXYCCNPAXCTGCY

SEQ ID NO: 379 - protein, 18 aa, Artificial Sequence
  Synthetically generated peptide
  VARIANT (3)..(5): Xaa = Any Amino Acid
  misc_feature (6)..(6): Xaa can be any naturally occurring amino acid
  misc_feature (14)..(14): Xaa can be any naturally occurring amino acid
CCXEXXYCCNPACXTGCY

SEQ ID NO: 380 - protein, 18 aa, Artificial Sequence
  Synthetically generated peptide
  VARIANT (3)..(5): Xaa = Any Amino Acid
  misc_feature (6)..(6): Xaa can be any naturally occurring amino acid
  misc_feature (15)..(15): Xaa can be any naturally occurring amino acid
CCXEXXYCCNPACTXGCY

SEQ ID NO: 381 - protein, 18 aa, Artificial Sequence
  Synthetically generated peptide
  VARIANT (3)..(5): Xaa = Any Amino Acid
  misc_feature (6)..(6): Xaa can be any naturally occurring amino acid
  misc_feature (16)..(16): Xaa can be any naturally occurring amino acid
CCXEXXYCCNPACTGXCY

SEQ ID NO: 382 - protein, 18 aa, Artificial Sequence
  Synthetically generated peptide
  VARIANT (3)..(5): Xaa = Any Amino Acid
  misc_feature (6)..(6): Xaa can be any naturally occurring amino acid
  misc_feature (17)..(17): Xaa can be any naturally occurring amino acid
CCXEXXYCCNPACTGCXY

SEQ ID NO: 383 - protein, 17 aa, Artificial Sequence
  Synthetically generated peptide
  VARIANT (3)..(5): Xaa = Any Amino Acid
  misc_feature (7)..(7): Xaa can be any naturally occurring amino acid
CCXEXYXCCNPACTGCY

SEQ ID NO: 384 - protein, 18 aa, Artificial Sequence
  Synthetically generated peptide
  VARIANT (3)..(5): Xaa = Any Amino Acid
  misc_feature (7)..(8): Xaa can be any naturally occurring amino acid
CCXEXYXXCCNPACTGCY

SEQ ID NO: 385 - protein, 18 aa, Artificial Sequence
  Synthetically generated peptide
  VARIANT (3)..(5): Xaa = Any Amino Acid
  misc_feature (7)..(7): Xaa can be any naturally occurring amino acid
  misc_feature (10)..(10): Xaa can be any naturally occurring amino acid
CCXEXYXCCXNPACTGCY

SEQ ID NO: 386 - protein, 18 aa, Artificial Sequence
  Synthetically generated peptide
  VARIANT (3)..(5): Xaa = Any Amino Acid
  misc_feature (7)..(7): Xaa can be any naturally occurring amino acid
  misc_feature (11)..(11): Xaa can be any naturally occurring amino acid
CCXEXYXCCNXPACTGCY

SEQ ID NO: 387 - protein, 18 aa, Artificial Sequence
  Synthetically generated peptide
  VARIANT (3)..(5): Xaa = Any Amino Acid
  misc_feature (7)..(7): Xaa can be any naturally occurring amino acid
  misc_feature (12)..(12): Xaa can be any naturally occurring amino acid
CCXEXYXCCNPXACTGCY

SEQ ID NO: 388 - protein, 18 aa, Artificial Sequence
  Synthetically generated peptide
  VARIANT (3)..(5): Xaa = Any Amino Acid
  misc_feature (7)..(7): Xaa can be any naturally occurring amino acid
  misc_feature (13)..(13): Xaa can be any naturally occurring amino acid
CCXEXYXCCNPAXCTGCY

SEQ ID NO: 389 - protein, 18 aa, Artificial Sequence
  Synthetically generated peptide
  VARIANT (3)..(5): Xaa = Any Amino Acid
  misc_feature (7)..(7): Xaa can be any naturally occurring amino acid
  misc_feature (14)..(14): Xaa can be any naturally occurring amino acid
CCXEXYXCCNPACXTGCY

SEQ ID NO: 390 - protein, 18 aa, Artificial Sequence
  Synthetically generated peptide
  VARIANT (3)..(5): Xaa = Any Amino Acid
  misc_feature (7)..(7): Xaa can be any naturally occurring amino acid
  misc_feature (15)..(15): Xaa can be any naturally occurring amino acid
CCXEXYXCCNPACTXGCY

SEQ ID NO: 391 - protein, 18 aa, Artificial Sequence
  Synthetically generated peptide
  VARIANT (3)..(5): Xaa = Any Amino Acid
  misc_feature (7)..(7): Xaa can be any naturally occurring amino acid
  misc_feature (16)..(16): Xaa can be any naturally occurring amino acid
CCXEXYXCCNPACTGXCY

SEQ ID NO: 392 - protein, 18 aa, Artificial Sequence
  Synthetically generated peptide
  VARIANT (3)..(5): Xaa = Any Amino Acid
  misc_feature (7)..(7): Xaa can be any naturally occurring amino acid
  misc_feature (17)..(17): Xaa can be any naturally occurring amino acid
CCXEXYXCCNPACTGCXY

SEQ ID NO: 393 - protein, 17 aa, Artificial Sequence
  Synthetically generated peptide
  VARIANT (3)..(5): Xaa = Any Amino Acid
  misc_feature (9)..(9): Xaa can be any naturally occurring amino acid
CCXEXYCCXNPACTGCY

SEQ ID NO: 394 - protein, 18 aa, Artificial Sequence
  Synthetically generated peptide
  VARIANT (3)..(5): Xaa = Any Amino Acid
  misc_feature (9)..(10): Xaa can be any naturally occurring amino acid
CCXEXYCCXXNPACTGCY

SEQ ID NO: 395 - protein, 18 aa, Artificial Sequence
  Synthetically generated peptide
  VARIANT (3)..(5): Xaa = Any Amino Acid
  misc_feature (9)..(9): Xaa can be any naturally occurring amino acid
  misc_feature (11)..(11): Xaa can be any naturally occurring amino acid
CCXEXYCCXNXPACTGCY

SEQ ID NO: 396 - protein, 18 aa, Artificial Sequence
  Synthetically generated peptide
  VARIANT (3)..(5): Xaa = Any Amino Acid
  misc_feature (9)..(9): Xaa can be any naturally occurring amino acid
  misc_feature (12)..(12): Xaa can be any naturally occurring amino acid
CCXEXYCCXNPXACTGCY

SEQ ID NO: 397 - protein, 18 aa, Artificial Sequence
  Synthetically generated peptide
  VARIANT (3)..(5): Xaa = Any Amino Acid
  misc_feature (9)..(9): Xaa can be any naturally occurring amino acid
  misc_feature (13)..(13): Xaa can be any naturally occurring amino acid
CCXEXYCCXNPAXCTGCY

SEQ ID NO: 398 - protein, 18 aa, Artificial Sequence
  Synthetically generated peptide
  VARIANT (3)..(5): Xaa = Any Amino Acid
  misc_feature (9)..(9): Xaa can be any naturally occurring amino acid
  misc_feature (14)..(14): Xaa can be any naturally occurring amino acid
CCXEXYCCXNPACXTGCY

SEQ ID NO: 399 - protein, 18 aa, Artificial Sequence
  Synthetically generated peptide
  VARIANT (3)..(5): Xaa = Any Amino Acid
  misc_feature (9)..(9): Xaa can be any naturally occurring amino acid
  misc_feature (15)..(15): Xaa can be any naturally occurring amino acid
CCXEXYCCXNPACTXGCY

SEQ ID NO: 400 - protein, 18 aa, Artificial Sequence
  Synthetically generated peptide
  VARIANT (3)..(5): Xaa = Any Amino Acid
  misc_feature (9)..(9): Xaa can be any naturally occurring amino acid
  misc_feature (16)..(16): Xaa can be any naturally occurring amino acid
CCXEXYCCXNPACTGXCY

SEQ ID NO: 401 - protein, 18 aa, Artificial Sequence
  Synthetically generated peptide
  VARIANT (3)..(5): Xaa = Any Amino Acid
  misc_feature (9)..(9): Xaa can be any naturally occurring amino acid
  misc_feature (17)..(17): Xaa can be any naturally occurring amino acid
CCXEXYCCXNPACTGCXY

SEQ ID NO: 402 - protein, 17 aa, Artificial Sequence
  Synthetically generated peptide
  VARIANT (3)..(5): Xaa = Any Amino Acid
  misc_feature (10)..(10): Xaa can be any naturally occurring amino acid
CCXEXYCCNXPACTGCY

SEQ ID NO: 403 - protein, 18 aa, Artificial Sequence
  Synthetically generated peptide
  VARIANT (3)..(5): Xaa = Any Amino Acid
  misc_feature (10)..(11): Xaa can be any naturally occurring amino acid
CCXEXYCCNXXPACTGCY

SEQ ID NO: 404 - protein, 18 aa, Artificial Sequence
  Synthetically generated peptide
  VARIANT (3)..(5): Xaa = Any Amino Acid
  misc_feature (10)..(10): Xaa can be any naturally occurring amino acid
  misc_feature (12)..(12): Xaa can be any naturally occurring amino acid
CCXEXYCCNXPXACTGCY

SEQ ID NO: 405 - protein, 18 aa, Artificial Sequence
  Synthetically generated peptide
  VARIANT (3)..(5): Xaa = Any Amino Acid
  misc_feature (10)..(10): Xaa can be any naturally occurring amino acid
  misc_feature (13)..(13): Xaa can be any naturally occurring amino acid
CCXEXYCCNXPAXCTGCY

SEQ ID NO: 406 - protein, 18 aa, Artificial Sequence
  Synthetically generated peptide
  VARIANT (3)..(5): Xaa = Any Amino Acid
  misc_feature (10)..(10): Xaa can be any naturally occurring amino acid
  misc_feature (14)..(14): Xaa can be any naturally occurring amino acid
CCXEXYCCNXPACXTGCY

SEQ ID NO: 407 - protein, 18 aa, Artificial Sequence
  Synthetically generated peptide
  VARIANT (3)..(5): Xaa = Any Amino Acid
  misc_feature (10)..(10): Xaa can be any naturally occurring amino acid
  misc_feature (15)..(15): Xaa can be any naturally occurring amino acid
CCXEXYCCNXPACTXGCY

SEQ ID NO: 408 - protein, 18 aa, Artificial Sequence
  Synthetically generated peptide
  VARIANT (3)..(5): Xaa = Any Amino Acid
  misc_feature (10)..(10): Xaa can be any naturally occurring amino acid
  misc_feature (16)..(16): Xaa can be any naturally occurring amino acid
CCXEXYCCNXPACTGXCY

SEQ ID NO: 409 - protein, 18 aa, Artificial Sequence
  Synthetically generated peptide
  VARIANT (3)..(5): Xaa = Any Amino Acid
  misc_feature (10)..(10): Xaa can be any naturally occurring amino acid
  misc_feature (17)..(17): Xaa can be any naturally occurring amino acid
CCXEXYCCNXPACTGCXY

SEQ ID NO: 410 - protein, 17 aa, Artificial Sequence
  Synthetically generated peptide
  VARIANT (3)..(5): Xaa = Any Amino Acid
  misc_feature (11)..(11): Xaa can be any naturally occurring amino acid
CCXEXYCCNPXACTGCY

SEQ ID NO: 411 - protein, 18 aa, Artificial Sequence
  Synthetically generated peptide
  VARIANT (3)..(5): Xaa = Any Amino Acid
  misc_feature (11)..(12): Xaa can be any naturally occurring amino acid
CCXEXYCCNPXXACTGCY

SEQ ID NO: 412 - protein, 18 aa, Artificial Sequence
  Synthetically generated peptide
  VARIANT (3)..(5): Xaa = Any Amino Acid
  misc_feature (11)..(11): Xaa can be any naturally occurring amino acid
  misc_feature (13)..(13): Xaa can be any naturally occurring amino acid
CCXEXYCCNPXAXCTGCY

SEQ ID NO: 413 - protein, 18 aa, Artificial Sequence
  Synthetically generated peptide
  VARIANT (3)..(5): Xaa = Any Amino Acid
  misc_feature (11)..(11): Xaa can be any naturally occurring amino acid
  misc_feature (14)..(14): Xaa can be any naturally occurring amino acid
CCXEXYCCNPXACXTGCY

SEQ ID NO: 414 - protein, 18 aa, Artificial Sequence
  Synthetically generated peptide
  VARIANT (3)..(5): Xaa = Any Amino Acid
  misc_feature (11)..(11): Xaa can be any naturally occurring amino acid
  misc_feature (15)..(15): Xaa can be any naturally occurring amino acid
CCXEXYCCNPXACTXGCY

SEQ ID NO: 415 - protein, 18 aa, Artificial Sequence
  Synthetically generated peptide
  VARIANT (3)..(5): Xaa = Any Amino Acid
  misc_feature (11)..(11): Xaa can be any naturally occurring amino acid
  misc_feature (16)..(16): Xaa can be any naturally occurring amino acid
CCXEXYCCNPXACTGXCY

SEQ ID NO: 416 - protein, 18 aa, Artificial Sequence
  Synthetically generated peptide
  VARIANT (3)..(5): Xaa = Any Amino Acid
  misc_feature (11)..(11): Xaa can be any naturally occurring amino acid
  misc_feature (17)..(17): Xaa can be any naturally occurring amino acid
CCXEXYCCNPXACTGCXY

SEQ ID NO: 417 - protein, 17 aa, Artificial Sequence
  Synthetically generated peptide
  VARIANT (3)..(5): Xaa = Any Amino Acid
  misc_feature (12)..(12): Xaa can be any naturally occurring amino acid
CCXEXYCCNPAXCTGCY

SEQ ID NO: 418 - protein, 18 aa, Artificial Sequence
  Synthetically generated peptide
  VARIANT (3)..(5): Xaa = Any Amino Acid
  misc_feature (12)..(13): Xaa can be any naturally occurring amino acid
CCXEXYCCNPAXXCTGCY

SEQ ID NO: 419 - protein, 18 aa, Artificial Sequence
  Synthetically generated peptide
  VARIANT (3)..(5): Xaa = Any Amino Acid
  misc_feature (12)..(12): Xaa can be any naturally occurring amino acid
  misc_feature (14)..(14): Xaa can be any naturally occurring amino acid
CCXEXYCCNPAXCXTGCY

SEQ ID NO: 420 - protein, 18 aa, Artificial Sequence
  Synthetically generated peptide
  VARIANT (3)..(5): Xaa = Any Amino Acid
  misc_feature (12)..(12): Xaa can be any naturally occurring amino acid
  misc_feature (15)..(15): Xaa can be any naturally occurring amino acid
CCXEXYCCNPAXCTXGCY

SEQ ID NO: 421 - protein, 18 aa, Artificial Sequence
  Synthetically generated peptide
  VARIANT (3)..(5): Xaa = Any Amino Acid
  misc_feature (12)..(12): Xaa can be any naturally occurring amino acid
  misc_feature (16)..(16): Xaa can be any naturally occurring amino acid
CCXEXYCCNPAXCTGXCY

SEQ ID NO: 422 - protein, 18 aa, Artificial Sequence
  Synthetically generated peptide
  VARIANT (3)..(5): Xaa = Any Amino Acid
  misc_feature (12)..(12): Xaa can be any naturally occurring amino acid
  misc_feature (17)..(17): Xaa can be any naturally occurring amino acid
CCXEXYCCNPAXCTGCXY

SEQ ID NO: 423 - protein, 17 aa, Artificial Sequence
  Synthetically generated peptide
  VARIANT (3)..(5): Xaa = Any Amino Acid
  misc_feature (13)..(13): Xaa can be any naturally occurring amino acid
CCXEXYCCNPACXTGCY

SEQ ID NO: 424 - protein, 18 aa, Artificial Sequence
  Synthetically generated peptide
  VARIANT (3)..(5): Xaa = Any Amino Acid
  misc_feature (13)..(14): Xaa can be any naturally occurring amino acid
CCXEXYCCNPACXXTGCY

SEQ ID NO: 425 - protein, 18 aa, Artificial Sequence
  Synthetically generated peptide
  VARIANT (3)..(5): Xaa = Any Amino Acid
  misc_feature (13)..(13): Xaa can be any naturally occurring amino acid
  misc_feature (15)..(15): Xaa can be any naturally occurring amino acid
CCXEXYCCNPACXTXGCY

SEQ ID NO: 426 - protein, 18 aa, Artificial Sequence
  Synthetically generated peptide
  VARIANT (3)..(5): Xaa = Any Amino Acid
  misc_feature (13)..(13): Xaa can be any naturally occurring amino acid
  misc_feature (16)..(16): Xaa can be any naturally occurring amino acid
CCXEXYCCNPACXTGXCY

SEQ ID NO: 427 - protein, 18 aa, Artificial Sequence
  Synthetically generated peptide
  VARIANT (3)..(5): Xaa = Any Amino Acid
  misc_feature (13)..(13): Xaa can be any naturally occurring amino acid
  misc_feature (17)..(17): Xaa can be any naturally occurring amino acid
CCXEXYCCNPACXTGCXY

SEQ ID NO: 428 - protein, 17 aa, Artificial Sequence
  Synthetically generated peptide
  VARIANT (3)..(5): Xaa = Any Amino Acid
  misc_feature (14)..(14): Xaa can be any naturally occurring amino acid
CCXEXYCCNPACTXGCY

SEQ ID NO: 429 - protein, 18 aa, Artificial Sequence
  Synthetically generated peptide
  VARIANT (3)..(5): Xaa = Any Amino Acid
  misc_feature (14)..(15): Xaa can be any naturally occurring amino acid
CCXEXYCCNPACTXXGCY

SEQ ID NO: 430 - protein, 18 aa, Artificial Sequence
  Synthetically generated peptide
  VARIANT (3)..(5): Xaa = Any Amino Acid
  misc_feature (14)..(14): Xaa can be any naturally occurring amino acid
  misc_feature (16)..(16): Xaa can be any naturally occurring amino acid
CCXEXYCCNPACTXGXCY

SEQ ID NO: 431 - protein, 18 aa, Artificial Sequence
  Synthetically generated peptide
  VARIANT (3)..(5): Xaa = Any Amino Acid
  misc_feature (14)..(14): Xaa can be any naturally occurring amino acid
  misc_feature (17)..(17): Xaa can be any naturally occurring amino acid
CCXEXYCCNPACTXGCXY

SEQ ID NO: 432 - protein, 17 aa, Artificial Sequence
  Synthetically generated peptide
  VARIANT (3)..(5): Xaa = Any Amino Acid
  misc_feature (15)..(15): Xaa can be any naturally occurring amino acid
CCXEXYCCNPACTGXCY

SEQ ID NO: 433 - protein, 18 aa, Artificial Sequence
  Synthetically generated peptide
  VARIANT (3)..(5): Xaa = Any Amino Acid
  misc_feature (15)..(16): Xaa can be any naturally occurring amino acid
CCXEXYCCNPACTGXXCY

SEQ ID NO: 434 - protein, 18 aa, Artificial Sequence
  Synthetically generated peptide
  VARIANT (3)..(5): Xaa = Any Amino Acid
  misc_feature (15)..(15): Xaa can be any naturally occurring amino acid
  misc_feature (17)..(17): Xaa can be any naturally occurring amino acid
CCXEXYCCNPACTGXCXY

SEQ ID NO: 435 - protein, 17 aa, Artificial Sequence
  Synthetically generated peptide
  VARIANT (3)..(5): Xaa = Any Amino Acid
  misc_feature (16)..(16): Xaa can be any naturally occurring amino acid
CCXEXYCCNPACTGCXY

SEQ ID NO: 436 - protein, 18 aa, Artificial Sequence
  Synthetically generated peptide
  VARIANT (3)..(5): Xaa = Any Amino Acid
  misc_feature (16)..(17): Xaa can be any naturally occurring amino acid
CCXEXYCCNPACTGCXXY

SEQ ID NO: 437 - protein, 16 aa, Artificial Sequence
  Synthetically generated peptide
  VARIANT (3)..(6): Xaa = Any Amino Acid
CCXEYXCCNPACTGCY

SEQ ID NO: 438 - protein, 17 aa, Artificial Sequence
  Synthetically generated peptide
  VARIANT (3)..(6): Xaa = Any Amino Acid
  misc_feature (7)..(7): Xaa can be any naturally occurring amino acid
CCXEYXXCCNPACTGCY

SEQ ID NO: 439 - protein, 18 aa, Artificial Sequence
  Synthetically generated peptide
  VARIANT (3)..(6): Xaa = Any Amino Acid
  misc_feature (7)..(8): Xaa can be any naturally occurring amino acid
CCXEYXXXCCNPACTGCY

SEQ ID NO: 440 - protein, 18 aa, Artificial Sequence
  Synthetically generated peptide
  VARIANT (3)..(6): Xaa = Any Amino Acid
  misc_feature (7)..(7): Xaa can be any naturally occurring amino acid
  misc_feature (10)..(10): Xaa can be any naturally occurring amino acid
CCXEYXXCCXNPACTGCY

SEQ ID NO: 441 - protein, 18 aa, Artificial Sequence
  Synthetically generated peptide
  VARIANT (3)..(6): Xaa = Any Amino Acid
  misc_feature (7)..(7): Xaa can be any naturally occurring amino acid
  misc_feature (11)..(11): Xaa can be any naturally occurring amino acid
CCXEYXXCCNXPACTGCY

SEQ ID NO: 442 - protein, 18 aa, Artificial Sequence
  Synthetically generated peptide
  VARIANT (3)..(6): Xaa = Any Amino Acid
  misc_feature (7)..(7): Xaa can be any naturally occurring amino acid
  misc_feature (12)..(12): Xaa can be any naturally occurring amino acid
CCXEYXXCCNPXACTGCY

SEQ ID NO: 443 - protein, 18 aa, Artificial Sequence
  Synthetically generated peptide
  VARIANT (3)..(6): Xaa = Any Amino Acid
  misc_feature (7)..(7): Xaa can be any naturally occurring amino acid
  misc_feature (13)..(13): Xaa can be any naturally occurring amino acid
CCXEYXXCCNPAXCTGCY

SEQ ID NO: 444 - protein, 18 aa, Artificial Sequence
  Synthetically generated peptide
  VARIANT (3)..(6): Xaa = Any Amino Acid
  misc_feature (7)..(7): Xaa can be any naturally occurring amino acid
  misc_feature (14)..(14): Xaa can be any naturally occurring amino acid
CCXEYXXCCNPACXTGCY

SEQ ID NO: 445 - protein, 18 aa, Artificial Sequence
  Synthetically generated peptide
  VARIANT (3)..(6): Xaa = Any Amino Acid
  misc_feature (7)..(7): Xaa can be any naturally occurring amino acid
  misc_feature (15)..(15): Xaa can be any naturally occurring amino acid
CCXEYXXCCNPACTXGCY

SEQ ID NO: 446 - protein, 18 aa, Artificial Sequence
  Synthetically generated peptide
  VARIANT (3)..(6): Xaa = Any Amino Acid
  misc_feature (7)..(7): Xaa can be any naturally occurring amino acid
  misc_feature (16)..(16): Xaa can be any naturally occurring amino acid
CCXEYXXCCNPACTGXCY

SEQ ID NO: 447 - protein, 18 aa, Artificial Sequence
  Synthetically generated peptide
  VARIANT (3)..(6): Xaa = Any Amino Acid
  misc_feature (7)..(7): Xaa can be any naturally occurring amino acid
  misc_feature (17)..(17): Xaa can be any naturally occurring amino acid
CCXEYXXCCNPACTGCXY

SEQ ID NO: 448 - protein, 17 aa, Artificial Sequence
  Synthetically generated peptide
  VARIANT (3)..(6): Xaa = Any Amino Acid
  misc_feature (9)..(9): Xaa can be any naturally occurring amino acid
CCXEYXCCXNPACTGCY

SEQ ID NO: 449 - protein, 18 aa, Artificial Sequence
  Synthetically generated peptide
  VARIANT (3)..(6): Xaa = Any Amino Acid
  misc_feature (9)..(10): Xaa can be any naturally occurring amino acid
CCXEYXCCXXNPACTGCY

SEQ ID NO: 450 - protein, 18 aa, Artificial Sequence
  Synthetically generated peptide
  VARIANT (3)..(6): Xaa = Any Amino Acid
  misc_feature (9)..(9): Xaa can be any naturally occurring amino acid
  misc_feature (11)..(11): Xaa can be any naturally occurring amino acid
CCXEYXCCXNXPACTGCY

SEQ ID NO: 451 - protein, 18 aa, Artificial Sequence
  Synthetically generated peptide
  VARIANT (3)..(6): Xaa = Any Amino Acid
  misc_feature (9)..(9): Xaa can be any naturally occurring amino acid
  misc_feature (12)..(12): Xaa can be any naturally occurring amino acid
CCXEYXCCXNPXACTGCY

SEQ ID NO: 452 - protein, 18 aa, Artificial Sequence
  Synthetically generated peptide
  VARIANT (3)..(6): Xaa = Any Amino Acid
  misc_feature (9)..(9): Xaa can be any naturally occurring amino acid
  misc_feature (13)..(13): Xaa can be any naturally occurring amino acid
CCXEYXCCXNPAXCTGCY

SEQ ID NO: 453 - protein, 18 aa, Artificial Sequence
  Synthetically generated peptide
  VARIANT (3)..(6): Xaa = Any Amino Acid
  misc_feature (9)..(9): Xaa can be any naturally occurring amino acid
  misc_feature (14)..(14): Xaa can be any naturally occurring amino acid
CCXEYXCCXNPACXTGCY

SEQ ID NO: 454 - protein, 18 aa, Artificial Sequence
  Synthetically generated peptide
  VARIANT (3)..(6): Xaa = Any Amino Acid
  misc_feature (9)..(9): Xaa can be any naturally occurring amino acid
  misc_feature (15)..(15): Xaa can be any naturally occurring amino acid
CCXEYXCCXNPACTXGCY

SEQ ID NO: 455 - protein, 18 aa, Artificial Sequence
  Synthetically generated peptide
  VARIANT (3)..(6): Xaa = Any Amino Acid
  misc_feature (9)..(9): Xaa can be any naturally occurring amino acid
  misc_feature (16)..(16): Xaa can be any naturally occurring amino acid
CCXEYXCCXNPACTGXCY

SEQ ID NO: 456 - protein, 18 aa, Artificial Sequence
  Synthetically generated peptide
  VARIANT (3)..(6): Xaa = Any Amino Acid
  misc_feature (9)..(9): Xaa can be any naturally occurring amino acid
  misc_feature (17)..(17): Xaa can be any naturally occurring amino acid
CCXEYXCCXNPACTGCXY

SEQ ID NO: 457 - protein, 17 aa, Artificial Sequence
  Synthetically generated peptide
  VARIANT (3)..(6): Xaa = Any Amino Acid
  misc_feature (10)..(10): Xaa can be any naturally occurring amino acid
CCXEYXCCNXPACTGCY

SEQ ID NO: 458 - protein, 18 aa, Artificial Sequence
  Synthetically generated peptide
  VARIANT (3)..(6): Xaa = Any Amino Acid
  misc_feature (10)..(11): Xaa can be any naturally occurring amino acid
CCXEYXCCNXXPACTGCY

SEQ ID NO: 459 - protein, 18 aa, Artificial Sequence
  Synthetically generated peptide
  VARIANT (3)..(6): Xaa = Any Amino Acid
  misc_feature (10)..(10): Xaa can be any naturally occurring amino acid
  misc_feature (12)..(12): Xaa can be any naturally occurring amino acid
CCXEYXCCNXPXACTGCY

SEQ ID NO: 460 - protein, 18 aa, Artificial Sequence
  Synthetically generated peptide
  VARIANT (3)..(6): Xaa = Any Amino Acid
  misc_feature (10)..(10): Xaa can be any naturally occurring amino acid
  misc_feature (13)..(13): Xaa can be any naturally occurring amino acid
CCXEYXCCNXPAXCTGCY

SEQ ID NO: 461 - protein, 18 aa, Artificial Sequence
  Synthetically generated peptide
  VARIANT (3)..(6): Xaa = Any Amino Acid
  misc_feature (10)..(10): Xaa can be any naturally occurring amino acid
  misc_feature (14)..(14): Xaa can be any naturally occurring amino acid
CCXEYXCCNXPACXTGCY

SEQ ID NO: 462 - protein, 18 aa, Artificial Sequence
  Synthetically generated peptide
  VARIANT (3)..(6): Xaa = Any Amino Acid
  misc_feature (10)..(10): Xaa can be any naturally occurring amino acid
  misc_feature (15)..(15): Xaa can be any naturally occurring amino acid
CCXEYXCCNXPACTXGCY

SEQ ID NO: 463 - protein, 18 aa, Artificial Sequence
  Synthetically generated peptide
  VARIANT (3)..(6): Xaa = Any Amino Acid
  misc_feature (10)..(10): Xaa can be any naturally occurring amino acid
  misc_feature (16)..(16): Xaa can be any naturally occurring amino acid
CCXEYXCCNXPACTGXCY

SEQ ID NO: 464 - protein, 18 aa, Artificial Sequence
  Synthetically generated peptide
  VARIANT (3)..(6): Xaa = Any Amino Acid
  misc_feature (10)..(10): Xaa can be any naturally occurring amino acid
  misc_feature (17)..(17): Xaa can be any naturally occurring amino acid
CCXEYXCCNXPACTGCXY

SEQ ID NO: 465 - protein, 17 aa, Artificial Sequence
  Synthetically generated peptide
  VARIANT (3)..(6): Xaa = Any Amino Acid
  misc_feature (11)..(11): Xaa can be any naturally occurring amino acid
CCXEYXCCNPXACTGCY

SEQ ID NO: 466 - protein, 18 aa, Artificial Sequence
  Synthetically generated peptide
  VARIANT (3)..(6): Xaa = Any Amino Acid
  misc_feature (11)..(12): Xaa can be any naturally occurring amino acid
CCXEYXCCNPXXACTGCY

SEQ ID NO: 467 - protein, 18 aa, Artificial Sequence
  Synthetically generated peptide
  VARIANT (3)..(6): Xaa = Any Amino Acid
  misc_feature (11)..(11): Xaa can be any naturally occurring amino acid
  misc_feature (13)..(13): Xaa can be any naturally occurring amino acid
CCXEYXCCNPXAXCTGCY

SEQ ID NO: 468 - protein, 18 aa, Artificial Sequence
  Synthetically generated peptide
  VARIANT (3)..(6): Xaa = Any Amino Acid
  misc_feature (11)..(11): Xaa can be any naturally occurring amino acid
  misc_feature (14)..(14): Xaa can be any naturally occurring amino acid
CCXEYXCCNPXACXTGCY

SEQ ID NO: 469 - protein, 18 aa, Artificial Sequence
  Synthetically generated peptide
  VARIANT (3)..(6): Xaa = Any Amino Acid
  misc_feature (11)..(11): Xaa can be any naturally occurring amino acid
  misc_feature (15)..(15): Xaa can be any naturally occurring amino acid
CCXEYXCCNPXACTXGCY

SEQ ID NO: 470 - protein, 18 aa, Artificial Sequence
  Synthetically generated peptide
  VARIANT (3)..(6): Xaa = Any Amino Acid
  misc_feature (11)..(11): Xaa can be any naturally occurring amino acid
  misc_feature (16)..(16): Xaa can be any naturally occurring amino acid
CCXEYXCCNPXACTGXCY

SEQ ID NO: 471 - protein, 18 aa, Artificial Sequence
  Synthetically generated peptide
  VARIANT (3)..(6): Xaa = Any Amino Acid
  misc_feature (11)..(11): Xaa can be any naturally occurring amino acid
  misc_feature (17)..(17): Xaa can be any naturally occurring amino acid
CCXEYXCCNPXACTGCXY

SEQ ID NO: 472 - protein, 17 aa, Artificial Sequence
  Synthetically generated peptide
  VARIANT (3)..(6): Xaa = Any Amino Acid
  misc_feature (12)..(12): Xaa can be any naturally occurring amino acid
CCXEYXCCNPAXCTGCY

SEQ ID NO: 473 - protein, 18 aa, Artificial Sequence
  Synthetically generated peptide
  VARIANT (3)..(6): Xaa = Any Amino Acid
  misc_feature (12)..(13): Xaa can be any naturally occurring amino acid
CCXEYXCCNPAXXCTGCY

SEQ ID NO: 474 - protein, 18 aa, Artificial Sequence
  Synthetically generated peptide
  VARIANT (3)..(6): Xaa = Any Amino Acid
  misc_feature (12)..(12): Xaa can be any naturally occurring amino acid
  misc_feature (14)..(14): Xaa can be any naturally occurring amino acid
CCXEYXCCNPAXCXTGCY

SEQ ID NO: 475 - protein, 18 aa, Artificial Sequence
  Synthetically generated peptide
  VARIANT (3)..(6): Xaa = Any Amino Acid
  misc_feature (12)..(12): Xaa can be any naturally occurring amino acid
  misc_feature (15)..(15): Xaa can be any naturally occurring amino acid
CCXEYXCCNPAXCTXGCY

SEQ ID NO: 476 - protein, 18 aa, Artificial Sequence
  Synthetically generated peptide
  VARIANT (3)..(6): Xaa = Any Amino Acid
  misc_feature (12)..(12): Xaa can be any naturally occurring amino acid
  misc_feature (16)..(16): Xaa can be any naturally occurring amino acid
CCXEYXCCNPAXCTGXCY

SEQ ID NO: 477 - protein, 18 aa, Artificial Sequence
  Synthetically generated peptide
  VARIANT (3)..(6): Xaa = Any Amino Acid
  misc_feature (12)..(12): Xaa can be any naturally occurring amino acid
  misc_feature (17)..(17): Xaa can be any naturally occurring amino acid
CCXEYXCCNPAXCTGCXY

SEQ ID NO: 478 - protein, 17 aa, Artificial Sequence
  Synthetically generated peptide
  VARIANT (3)..(6): Xaa = Any Amino Acid
  misc_feature (13)..(13): Xaa can be any naturally occurring amino acid
CCXEYXCCNPACXTGCY

SEQ ID NO: 479 - protein, 18 aa, Artificial Sequence
  Synthetically generated peptide
  VARIANT (3)..(6): Xaa = Any Amino Acid
  misc_feature (13)..(14): Xaa can be any naturally occurring amino acid
CCXEYXCCNPACXXTGCY

SEQ ID NO: 480 - protein, 18 aa, Artificial Sequence
  Synthetically generated peptide
  VARIANT (3)..(6): Xaa = Any Amino Acid
  misc_feature (13)..(13): Xaa can be any naturally occurring amino acid
  misc_feature (15)..(15): Xaa can be any naturally occurring amino acid
CCXEYXCCNPACXTXGCY

SEQ ID NO: 481 - protein, 18 aa, Artificial Sequence
  Synthetically generated peptide
  VARIANT (3)..(6): Xaa = Any Amino Acid
  misc_feature (13)..(13): Xaa can be any naturally occurring amino acid
  misc_feature (16)..(16): Xaa can be any naturally occurring amino acid
CCXEYXCCNPACXTGXCY

SEQ ID NO: 482 - protein, 18 aa, Artificial Sequence
  Synthetically generated peptide
  VARIANT (3)..(6): Xaa = Any Amino Acid
  misc_feature (13)..(13): Xaa can be any naturally occurring amino acid
  misc_feature (17)..(17): Xaa can be any naturally occurring amino acid
CCXEYXCCNPACXTGCXY

SEQ ID NO: 483 - protein, 17 aa, Artificial Sequence
  Synthetically generated peptide
  VARIANT (3)..(6): Xaa = Any Amino Acid
  misc_feature (14)..(14): Xaa can be any naturally occurring amino acid
CCXEYXCCNPACTXGCY

SEQ ID NO: 484 - protein, 18 aa, Artificial Sequence
  Synthetically generated peptide
  VARIANT (3)..(6): Xaa = Any Amino Acid
  misc_feature (14)..(15): Xaa can be any naturally occurring amino acid
CCXEYXCCNPACTXXGCY

SEQ ID NO: 485 - protein, 18 aa, Artificial Sequence
  Synthetically generated peptide
  VARIANT (3)..(6): Xaa = Any Amino Acid
  misc_feature (14)..(14): Xaa can be any naturally occurring amino acid
  misc_feature (16)..(16): Xaa can be any naturally occurring amino acid
CCXEYXCCNPACTXGXCY

SEQ ID NO: 486 - protein, 18 aa, Artificial Sequence
  Synthetically generated peptide
  VARIANT (3)..(6): Xaa = Any Amino Acid
  misc_feature (14)..(14): Xaa can be any naturally occurring amino acid
  misc_feature (17)..(17): Xaa can be any naturally occurring amino acid
CCXEYXCCNPACTXGCXY

SEQ ID NO: 487 - protein, 17 aa, Artificial Sequence
  Synthetically generated peptide
  VARIANT (3)..(6): Xaa = Any Amino Acid
  misc_feature (15)..(15): Xaa can be any naturally occurring amino acid
CCXEYXCCNPACTGXCY

SEQ ID NO: 488 - protein, 18 aa, Artificial Sequence
  Synthetically generated peptide
  VARIANT (3)..(6): Xaa = Any Amino Acid
  misc_feature (15)..(16): Xaa can be any naturally occurring amino acid
CCXEYXCCNPACTGXXCY

SEQ ID NO: 489 - protein, 18 aa, Artificial Sequence
  Synthetically generated peptide
  VARIANT (3)..(6): Xaa = Any Amino Acid
  misc_feature (15)..(15): Xaa can be any naturally occurring amino acid
  misc_feature (17)..(17): Xaa can be any naturally occurring amino acid
CCXEYXCCNPACTGXCXY

SEQ ID NO: 490 - protein, 17 aa, Artificial Sequence
  Synthetically generated peptide
  VARIANT (3)..(6): Xaa = Any Amino Acid
  misc_feature (16)..(16): Xaa can be any naturally occurring amino acid
CCXEYXCCNPACTGCXY

SEQ ID NO: 491 - protein, 18 aa, Artificial Sequence
  Synthetically generated peptide
  VARIANT (3)..(6): Xaa = Any Amino Acid
  misc_feature (16)..(17): Xaa can be any naturally occurring amino acid
CCXEYXCCNPACTGCXXY

SEQ ID NO: 492 - protein, 16 aa, Artificial Sequence
  Synthetically generated peptide
  VARIANT (3)..(8): Xaa = Any Amino Acid
CCXEYCCXNPACTGCY

SEQ ID NO: 493 - protein, 17 aa, Artificial Sequence
  Synthetically generated peptide
  VARIANT (3)..(8): Xaa = Any Amino Acid
  misc_feature (9)..(9): Xaa can be any naturally occurring amino acid
CCXEYCCXXNPACTGCY

SEQ ID NO: 494 - protein, 18 aa, Artificial Sequence
  Synthetically generated peptide
  VARIANT (3)..(8): Xaa = Any Amino Acid
  misc_feature (9)..(10): Xaa can be any naturally occurring amino acid
CCXEYCCXXXNPACTGCY

SEQ ID NO: 495 - protein, 18 aa, Artificial Sequence
  Synthetically generated peptide
  VARIANT (3)..(8): Xaa = Any Amino Acid
  misc_feature (9)..(9): Xaa can be any naturally occurring amino acid
  misc_feature (11)..(11): Xaa can be any naturally occurring amino acid
CCXEYCCXXNXPACTGCY

SEQ ID NO: 496 - protein, 18 aa, Artificial Sequence
  Synthetically generated peptide
  VARIANT (3)..(8): Xaa = Any Amino Acid
  misc_feature (9)..(9): Xaa can be any naturally occurring amino acid
  misc_feature (12)..(12): Xaa can be any naturally occurring amino acid
CCXEYCCXXNPXACTGCY

SEQ ID NO: 497 - protein, 18 aa, Artificial Sequence
  Synthetically generated peptide
  VARIANT (3)..(8): Xaa = Any Amino Acid
  misc_feature (9)..(9): Xaa can be any naturally occurring amino acid
  misc_feature (13)..(13): Xaa can be any naturally occurring amino acid
CCXEYCCXXNPAXCTGCY

SEQ ID NO: 498 - protein, 18 aa, Artificial Sequence
  Synthetically generated peptide
  VARIANT (3)..(8): Xaa = Any Amino Acid
  misc_feature (9)..(9): Xaa can be any naturally occurring amino acid
  misc_feature (14)..(14): Xaa can be any naturally occurring amino acid
CCXEYCCXXNPACXTGCY

SEQ ID NO: 499 - protein, 18 aa, Artificial Sequence
  Synthetically generated peptide
  VARIANT (3)..(8): Xaa = Any Amino Acid
  misc_feature (9)..(9): Xaa can be any naturally occurring amino acid
  misc_feature (15)..(15): Xaa can be any naturally occurring amino acid
CCXEYCCXXNPACTXGCY

SEQ ID NO: 500 - protein, 18 aa, Artificial Sequence
  Synthetically generated peptide
  VARIANT (3)..(8): Xaa = Any Amino Acid
  misc_feature (9)..(9): Xaa can be any naturally occurring amino acid
  misc_feature (16)..(16): Xaa can be any naturally occurring amino acid
CCXEYCCXXNPACTGXCY

SEQ ID NO: 501 - protein, 18 aa, Artificial Sequence
  Synthetically generated peptide
  VARIANT (3)..(8): Xaa = Any Amino Acid
  misc_feature (9)..(9): Xaa can be any naturally occurring amino acid
  misc_feature (17)..(17): Xaa can be any naturally occurring amino acid
CCXEYCCXXNPACTGCXY

SEQ ID NO: 502 - protein, 17 aa, Artificial Sequence
  Synthetically generated peptide
  VARIANT (3)..(8): Xaa = Any Amino Acid
  misc_feature (10)..(10): Xaa can be any naturally occurring amino acid
CCXEYCCXNXPACTGCY

SEQ ID NO: 503 - protein, 18 aa, Artificial Sequence
  Synthetically generated peptide
  VARIANT (3)..(8): Xaa = Any Amino Acid
  misc_feature (10)..(11): Xaa can be any naturally occurring amino acid
CCXEYCCXNXXPACTGCY

SEQ ID NO: 504 - protein, 18 aa, Artificial Sequence
  Synthetically generated peptide
  VARIANT (3)..(8): Xaa = Any Amino Acid
  misc_feature (10)..(10): Xaa can be any naturally occurring amino acid
  misc_feature (12)..(12): Xaa can be any naturally occurring amino acid
CCXEYCCXNXPXACTGCY

SEQ ID NO: 505 - protein, 18 aa, Artificial Sequence
  Synthetically generated peptide
  VARIANT (3)..(8): Xaa = Any Amino Acid
  misc_feature (10)..(10): Xaa can be any naturally occurring amino acid
  misc_feature (13)..(13): Xaa can be any naturally occurring amino acid
CCXEYCCXNXPAXCTGCY

SEQ ID NO: 506 - protein, 18 aa, Artificial Sequence
  Synthetically generated peptide
  VARIANT (3)..(8): Xaa = Any Amino Acid
  misc_feature (10)..(10): Xaa can be any naturally occurring amino acid
  misc_feature (14)..(14): Xaa can be any naturally occurring amino acid
CCXEYCCXNXPACXTGCY

SEQ ID NO: 507 - protein, 18 aa, Artificial Sequence
  Synthetically generated peptide
  VARIANT (3)..(8): Xaa = Any Amino Acid
  misc_feature (10)..(10): Xaa can be any naturally occurring amino acid
  misc_feature (15)..(15): Xaa can be any naturally occurring amino acid
CCXEYCCXNXPACTXGCY

SEQ ID NO: 508 - protein, 18 aa, Artificial Sequence
  Synthetically generated peptide
  VARIANT (3)..(8): Xaa = Any Amino Acid
  misc_feature (10)..(10): Xaa can be any naturally occurring amino acid
  misc_feature (16)..(16): Xaa can be any naturally occurring amino acid
CCXEYCCXNXPACTGXCY

SEQ ID NO: 509 - protein, 18 aa, Artificial Sequence
  Synthetically generated peptide
  VARIANT (3)..(8): Xaa = Any Amino Acid
  misc_feature (10)..(10): Xaa can be any naturally occurring amino acid
  misc_feature (17)..(17): Xaa can be any naturally occurring amino acid
CCXEYCCXNXPACTGCXY

SEQ ID NO: 510 - protein, 17 aa, Artificial Sequence
  Synthetically generated peptide
  VARIANT (3)..(8): Xaa = Any Amino Acid
  misc_feature (11)..(11): Xaa can be any naturally occurring amino acid
CCXEYCCXNPXACTGCY

SEQ ID NO: 511 - protein, 18 aa, Artificial Sequence
  Synthetically generated peptide
  VARIANT (3)..(8): Xaa = Any Amino Acid
  misc_feature (11)..(12): Xaa can be any naturally occurring amino acid
CCXEYCCXNPXXACTGCY

SEQ ID NO: 512 - protein, 18 aa, Artificial Sequence
  Synthetically generated peptide
  VARIANT (3)..(8): Xaa = Any Amino Acid
  misc_feature (11)..(11): Xaa can be any naturally occurring amino acid
  misc_feature (13)..(13): Xaa can be any naturally occurring amino acid
CCXEYCCXNPXAXCTGCY

SEQ ID NO: 513 - protein, 18 aa, Artificial Sequence
  Synthetically generated peptide
  VARIANT (3)..(8): Xaa = Any Amino Acid
  misc_feature (11)..(11): Xaa can be any naturally occurring amino acid
  misc_feature (14)..(14): Xaa can be any naturally occurring amino acid
CCXEYCCXNPXACXTGCY

SEQ ID NO: 514 - protein, 18 aa, Artificial Sequence
  Synthetically generated peptide
  VARIANT (3)..(8): Xaa = Any Amino Acid
  misc_feature (11)..(11): Xaa can be any naturally occurring amino acid
  misc_feature (15)..(15): Xaa can be any naturally occurring amino acid
CCXEYCCXNPXACTXGCY

SEQ ID NO: 515 - protein, 18 aa, Artificial Sequence
  Synthetically generated peptide
  VARIANT (3)..(8): Xaa = Any Amino Acid
  misc_feature (11)..(11): Xaa can be any naturally occurring amino acid
  misc_feature (16)..(16): Xaa can be any naturally occurring amino acid
CCXEYCCXNPXACTGXCY

SEQ ID NO: 516 - protein, 18 aa, Artificial Sequence
  Synthetically generated peptide
  VARIANT (3)..(8): Xaa = Any Amino Acid
  misc_feature (11)..(11): Xaa can be any naturally occurring amino acid
  misc_feature (17)..(17): Xaa can be any naturally occurring amino acid
CCXEYCCXNPXACTGCXY

SEQ ID NO: 517 - protein, 17 aa, Artificial Sequence
  Synthetically generated peptide
  VARIANT (3)..(8): Xaa = Any Amino Acid
  misc_feature (12)..(12): Xaa can be any naturally occurring amino acid
CCXEYCCXNPAXCTGCY

SEQ ID NO: 518 - protein, 18 aa, Artificial Sequence
  Synthetically generated peptide
  VARIANT (3)..(8): Xaa = Any Amino Acid
  misc_feature (12)..(13): Xaa can be any naturally occurring amino acid
CCXEYCCXNPAXXCTGCY

SEQ ID NO: 519 - protein, 18 aa, Artificial Sequence
  Synthetically generated peptide
  VARIANT (3)..(8): Xaa = Any Amino Acid
  misc_feature (12)..(12): Xaa can be any naturally occurring amino acid
  misc_feature (14)..(14): Xaa can be any naturally occurring amino acid
CCXEYCCXNPAXCXTGCY

SEQ ID NO: 520 - protein, 18 aa, Artificial Sequence
  Synthetically generated peptide
  VARIANT (3)..(8): Xaa = Any Amino Acid
  misc_feature (12)..(12): Xaa can be any naturally occurring amino acid
  misc_feature (15)..(15): Xaa can be any naturally occurring amino acid
CCXEYCCXNPAXCTXGCY

SEQ ID NO: 521 - protein, 18 aa, Artificial Sequence
  Synthetically generated peptide
  VARIANT (3)..(8): Xaa = Any Amino Acid
  misc_feature (12)..(12): Xaa can be any naturally occurring amino acid
  misc_feature (16)..(16): Xaa can be any naturally occurring amino acid
CCXEYCCXNPAXCTGXCY

SEQ ID NO: 522 - protein, 18 aa, Artificial Sequence
  Synthetically generated peptide
  VARIANT (3)..(8): Xaa = Any Amino Acid
  misc_feature (12)..(12): Xaa can be any naturally occurring amino acid
  misc_feature (17)..(17): Xaa can be any naturally occurring amino acid
CCXEYCCXNPAXCTGCXY

SEQ ID NO: 523 - protein, 17 aa, Artificial Sequence
  Synthetically generated peptide
  VARIANT (3)..(8): Xaa = Any Amino Acid
  misc_feature (13)..(13): Xaa can be any naturally occurring amino acid
CCXEYCCXNPACXTGCY

SEQ ID NO: 524 - protein, 18 aa, Artificial Sequence
  Synthetically generated peptide
  VARIANT (3)..(8): Xaa = Any Amino Acid
  misc_feature (13)..(14): Xaa can be any naturally occurring amino acid
CCXEYCCXNPACXXTGCY

SEQ ID NO: 525 - protein, 18 aa, Artificial Sequence
  Synthetically generated peptide
  VARIANT (3)..(8): Xaa = Any Amino Acid
  misc_feature (13)..(13): Xaa can be any naturally occurring amino acid
  misc_feature (15)..(15): Xaa can be any naturally occurring amino acid
CCXEYCCXNPACXTXGCY

SEQ ID NO: 526 - protein, 18 aa, Artificial Sequence
  Synthetically generated peptide
  VARIANT (3)..(8): Xaa = Any Amino Acid
  misc_feature (13)..(13): Xaa can be any naturally occurring amino acid
  misc_feature (16)..(16): Xaa can be any naturally occurring amino acid
CCXEYCCXNPACXTGXCY

SEQ ID NO: 527 - protein, 18 aa, Artificial Sequence
  Synthetically generated peptide
  VARIANT (3)..(8): Xaa = Any Amino Acid
  misc_feature (13)..(13): Xaa can be any naturally occurring amino acid
  misc_feature (17)..(17): Xaa can be any naturally occurring amino acid
CCXEYCCXNPACXTGCXY

SEQ ID NO: 528 - protein, 17 aa, Artificial Sequence
  Synthetically generated peptide
  VARIANT (3)..(8): Xaa = Any Amino Acid
  misc_feature (14)..(14): Xaa can be any naturally occurring amino acid
CCXEYCCXNPACTXGCY

SEQ ID NO: 529 - protein, 18 aa, Artificial Sequence
  Synthetically generated peptide
  VARIANT (3)..(8): Xaa = Any Amino Acid
  misc_feature (14)..(15): Xaa can be any naturally occurring amino acid
CCXEYCCXNPACTXXGCY

SEQ ID NO: 530 - protein, 18 aa, Artificial Sequence
  Synthetically generated peptide
  VARIANT (3)..(8): Xaa = Any Amino Acid
  misc_feature (14)..(14): Xaa can be any naturally occurring amino acid
  misc_feature (16)..(16): Xaa can be any naturally occurring amino acid
CCXEYCCXNPACTXGXCY

SEQ ID NO: 531 - protein, 18 aa, Artificial Sequence
  Synthetically generated peptide
  VARIANT (3)..(8): Xaa = Any Amino Acid
  misc_feature (14)..(14): Xaa can be any naturally occurring amino acid
  misc_feature (17)..(17): Xaa can be any naturally occurring amino acid
CCXEYCCXNPACTXGCXY

SEQ ID NO: 532 - protein, 17 aa, Artificial Sequence
  Synthetically generated peptide
  VARIANT (3)..(8): Xaa = Any Amino Acid
  misc_feature (15)..(15): Xaa can be any naturally occurring amino acid
CCXEYCCXNPACTGXCY

SEQ ID NO: 533 - protein, 18 aa, Artificial Sequence
  Synthetically generated peptide
  VARIANT (3)..(8): Xaa = Any Amino Acid
  misc_feature (15)..(16): Xaa can be any naturally occurring amino acid
CCXEYCCXNPACTGXXCY

SEQ ID NO: 534 - protein, 18 aa, Artificial Sequence
  Synthetically generated peptide
  VARIANT (3)..(8): Xaa = Any Amino Acid
  misc_feature (15)..(15): Xaa can be any naturally occurring amino acid
  misc_feature (17)..(17): Xaa can be any naturally occurring amino acid
CCXEYCCXNPACTGXCXY

SEQ ID NO: 535 - protein, 17 aa, Artificial Sequence
  Synthetically generated peptide
  VARIANT (3)..(8): Xaa = Any Amino Acid
  misc_feature (16)..(16): Xaa can be any naturally occurring amino acid
CCXEYCCXNPACTGCXY

SEQ ID NO: 536 - protein, 18 aa, Artificial Sequence
  Synthetically generated peptide
  VARIANT (3)..(8): Xaa = Any Amino Acid
  misc_feature (16)..(17): Xaa can be any naturally occurring amino acid
CCXEYCCXNPACTGCXXY

SEQ ID NO: 537 - protein, 16 aa, Artificial Sequence
  Synthetically generated peptide
  VARIANT (3)..(9): Xaa = Any Amino Acid
CCXEYCCNXPACTGCY

SEQ ID NO: 538 - protein, 17 aa, Artificial Sequence
  Synthetically generated peptide
  VARIANT (3)..(9): Xaa = Any Amino Acid
  misc_feature (10)..(10): Xaa can be any naturally occurring amino acid
CCXEYCCNXXPACTGCY

SEQ ID NO: 539 - protein, 18 aa, Artificial Sequence
  Synthetically generated peptide
  VARIANT (3)..(9): Xaa = Any Amino Acid
  misc_feature (10)..(11): Xaa can be any naturally occurring amino acid
CCXEYCCNXXXPACTGCY

SEQ ID NO: 540 - protein, 18 aa, Artificial Sequence
  Synthetically generated peptide
  VARIANT (3)..(9): Xaa = Any Amino Acid
  misc_feature (10)..(10): Xaa can be any naturally occurring amino acid
  misc_feature (12)..(12): Xaa can be any naturally occurring amino acid
CCXEYCCNXXPXACTGCY

SEQ ID NO: 541 - protein, 18 aa, Artificial Sequence
  Synthetically generated peptide
  VARIANT (3)..(9): Xaa = Any Amino Acid
  misc_feature (10)..(10): Xaa can be any naturally occurring amino acid
  misc_feature (13)..(13): Xaa can be any naturally occurring amino acid
CCXEYCCNXXPAXCTGCY

SEQ ID NO: 542 - protein, 18 aa, Artificial Sequence
  Synthetically generated peptide
  VARIANT (3)..(9): Xaa = Any Amino Acid
  misc_feature (10)..(10): Xaa can be any naturally occurring amino acid
  misc_feature (14)..(14): Xaa can be any naturally occurring amino acid
CCXEYCCNXXPACXTGCY

SEQ ID NO: 543 - protein, 18 aa, Artificial Sequence
  Synthetically generated peptide
  VARIANT (3)..(9): Xaa = Any Amino Acid
  misc_feature (10)..(10): Xaa can be any naturally occurring amino acid
  misc_feature (15)..(15): Xaa can be any naturally occurring amino acid
CCXEYCCNXXPACTXGCY

SEQ ID NO: 544 - protein, 18 aa, Artificial Sequence
  Synthetically generated peptide
  VARIANT (3)..(9): Xaa = Any Amino Acid
  misc_feature (10)..(10): Xaa can be any naturally occurring amino acid
  misc_feature (16)..(16): Xaa can be any naturally occurring amino acid
CCXEYCCNXXPACTGXCY

SEQ ID NO: 545 - protein, 18 aa, Artificial Sequence
  Synthetically generated peptide
  VARIANT (3)..(9): Xaa = Any Amino Acid
  misc_feature (10)..(10): Xaa can be any naturally occurring amino acid
  misc_feature (17)..(17): Xaa can be any naturally occurring amino acid
CCXEYCCNXXPACTGCXY

SEQ ID NO: 546 - protein, 17 aa, Artificial Sequence
  Synthetically generated peptide
  VARIANT (3)..(9): Xaa = Any Amino Acid
  misc_feature (11)..(11): Xaa can be any naturally occurring amino acid
CCXEYCCNXPXACTGCY

SEQ ID NO: 547 - protein, 18 aa, Artificial Sequence
  Synthetically generated peptide
  VARIANT (3)..(9): Xaa = Any Amino Acid
  misc_feature (11)..(12): Xaa can be any naturally occurring amino acid
CCXEYCCNXPXXACTGCY

SEQ ID NO: 548 - protein, 18 aa, Artificial Sequence
  Synthetically generated peptide
  VARIANT (3)..(9): Xaa = Any Amino Acid
  misc_feature (11)..(11): Xaa can be any naturally occurring amino acid
  misc_feature (13)..(13): Xaa can be any naturally occurring amino acid
CCXEYCCNXPXAXCTGCY

SEQ ID NO: 549 - protein, 18 aa, Artificial Sequence
  Synthetically generated peptide
  VARIANT (3)..(9): Xaa = Any Amino Acid
  misc_feature (11)..(11): Xaa can be any naturally occurring amino acid
  misc_feature (14)..(14): Xaa can be any naturally occurring amino acid
CCXEYCCNXPXACXTGCY

SEQ ID NO: 550 - protein, 18 aa, Artificial Sequence
  Synthetically generated peptide
  VARIANT (3)..(9): Xaa = Any Amino Acid
  misc_feature (11)..(11): Xaa can be any naturally occurring amino acid
  misc_feature (15)..(15): Xaa can be any naturally occurring amino acid
CCXEYCCNXPXACTXGCY

SEQ ID NO: 551 - protein, 18 aa, Artificial Sequence
  Synthetically generated peptide
  VARIANT (3)..(9): Xaa = Any Amino Acid
  misc_feature (11)..(11): Xaa can be any naturally occurring amino acid
  misc_feature (16)..(16): Xaa can be any naturally occurring amino acid
CCXEYCCNXPXACTGXCY

SEQ ID NO: 552 - protein, 18 aa, Artificial Sequence
  Synthetically generated peptide
  VARIANT (3)..(9): Xaa = Any Amino Acid
  misc_feature (11)..(11): Xaa can be any naturally occurring amino acid
  misc_feature (17)..(17): Xaa can be any naturally occurring amino acid
CCXEYCCNXPXACTGCXY

SEQ ID NO: 553 - protein, 17 aa, Artificial Sequence
  Synthetically generated peptide
  VARIANT (3)..(9): Xaa = Any Amino Acid
  misc_feature (12)..(12): Xaa can be any naturally occurring amino acid
CCXEYCCNXPAXCTGCY

SEQ ID NO: 554 - protein, 18 aa, Artificial Sequence
  Synthetically generated peptide
  VARIANT (3)..(9): Xaa = Any Amino Acid
  misc_feature (12)..(13): Xaa can be any naturally occurring amino acid
CCXEYCCNXPAXXCTGCY

SEQ ID NO: 555 - protein, 18 aa, Artificial Sequence
  Synthetically generated peptide
  VARIANT (3)..(9): Xaa = Any Amino Acid
  misc_feature (12)..(12): Xaa can be any naturally occurring amino acid
  misc_feature (14)..(14): Xaa can be any naturally occurring amino acid
CCXEYCCNXPAXCXTGCY

SEQ ID NO: 556 - protein, 18 aa, Artificial Sequence
  Synthetically generated peptide
  VARIANT (3)..(9): Xaa = Any Amino Acid
  misc_feature (12)..(12): Xaa can be any naturally occurring amino acid
  misc_feature (15)..(15): Xaa can be any naturally occurring amino acid
CCXEYCCNXPAXCTXGCY

SEQ ID NO: 557 - protein, 18 aa, Artificial Sequence
  Synthetically generated peptide
  VARIANT (3)..(9): Xaa = Any Amino Acid
  misc_feature (12)..(12): Xaa can be any naturally occurring amino acid
  misc_feature (16)..(16): Xaa can be any naturally occurring amino acid
CCXEYCCNXPAXCTGXCY

SEQ ID NO: 558 - protein, 18 aa, Artificial Sequence
  Synthetically generated peptide
  VARIANT (3)..(9): Xaa = Any Amino Acid
  misc_feature (12)..(12): Xaa can be any naturally occurring amino acid
  misc_feature (17)..(17): Xaa can be any naturally occurring amino acid
CCXEYCCNXPAXCTGCXY

SEQ ID NO: 559 - protein, 17 aa, Artificial Sequence
  Synthetically generated peptide
  VARIANT (3)..(9): Xaa = Any Amino Acid
  misc_feature (13)..(13): Xaa can be any naturally occurring amino acid
CCXEYCCNXPACXTGCY

SEQ ID NO: 560 - protein, 18 aa, Artificial Sequence
  Synthetically generated peptide
  VARIANT (3)..(9): Xaa = Any Amino Acid
  misc_feature (13)..(14): Xaa can be any naturally occurring amino acid
CCXEYCCNXPACXXTGCY

SEQ ID NO: 561 - protein, 18 aa, Artificial Sequence
  Synthetically generated peptide
  VARIANT (3)..(9): Xaa = Any Amino Acid
  misc_feature (13)..(13): Xaa can be any naturally occurring amino acid
  misc_feature (15)..(15): Xaa can be any naturally occurring amino acid
CCXEYCCNXPACXTXGCY

SEQ ID NO: 562 - protein, 18 aa, Artificial Sequence
  Synthetically generated peptide
  VARIANT (3)..(9): Xaa = Any Amino Acid
  misc_feature (13)..(13): Xaa can be any naturally occurring amino acid
  misc_feature (16)..(16): Xaa can be any naturally occurring amino acid
CCXEYCCNXPACXTGXCY

SEQ ID NO: 563 - protein, 18 aa, Artificial Sequence
  Synthetically generated peptide
  VARIANT (3)..(9): Xaa = Any Amino Acid
  misc_feature (13)..(13): Xaa can be any naturally occurring amino acid
  misc_feature (17)..(17): Xaa can be any naturally occurring amino acid
CCXEYCCNXPACXTGCXY

SEQ ID NO: 564 - protein, 17 aa, Artificial Sequence
  Synthetically generated peptide
  VARIANT (3)..(9): Xaa = Any Amino Acid
  misc_feature (14)..(14): Xaa can be any naturally occurring amino acid
CCXEYCCNXPACTXGCY

SEQ ID NO: 565 - protein, 18 aa, Artificial Sequence
  Synthetically generated peptide
  VARIANT (3)..(9): Xaa = Any Amino Acid
  misc_feature (14)..(15): Xaa can be any naturally occurring amino acid
CCXEYCCNXPACTXXGCY

SEQ ID NO: 566 - protein, 18 aa, Artificial Sequence
  Synthetically generated peptide
  VARIANT (3)..(9): Xaa = Any Amino Acid
  misc_feature (14)..(14): Xaa can be any naturally occurring amino acid
  misc_feature (16)..(16): Xaa can be any naturally occurring amino acid
CCXEYCCNXPACTXGXCY

SEQ ID NO: 567 - protein, 18 aa, Artificial Sequence
  Synthetically generated peptide
  VARIANT (3)..(9): Xaa = Any Amino Acid
  misc_feature (14)..(14): Xaa can be any naturally occurring amino acid
  misc_feature (17)..(17): Xaa can be any naturally occurring amino acid
CCXEYCCNXPACTXGCXY

SEQ ID NO: 568 - protein, 17 aa, Artificial Sequence
  Synthetically generated peptide
  VARIANT (3)..(9): Xaa = Any Amino Acid
  misc_feature (15)..(15): Xaa can be any naturally occurring amino acid
CCXEYCCNXPACTGXCY

SEQ ID NO: 569 - protein, 18 aa, Artificial Sequence
  Synthetically generated peptide
  VARIANT (3)..(9): Xaa = Any Amino Acid
  misc_feature (15)..(16): Xaa can be any naturally occurring amino acid
CCXEYCCNXPACTGXXCY

SEQ ID NO: 570 - protein, 18 aa, Artificial Sequence
  Synthetically generated peptide
  VARIANT (3)..(9): Xaa = Any Amino Acid
  misc_feature (15)..(15): Xaa can be any naturally occurring amino acid
  misc_feature (17)..(17): Xaa can be any naturally occurring amino acid
CCXEYCCNXPACTGXCXY

SEQ ID NO: 571 - protein, 17 aa, Artificial Sequence
  Synthetically generated peptide
  VARIANT (3)..(9): Xaa = Any Amino Acid
  misc_feature (16)..(16): Xaa can be any naturally occurring amino acid
CCXEYCCNXPACTGCXY

SEQ ID NO: 572 - protein, 18 aa, Artificial Sequence
  Synthetically generated peptide
  VARIANT (3)..(9): Xaa = Any Amino Acid
  misc_feature (16)..(17): Xaa can be any naturally occurring amino acid
CCXEYCCNXPACTGCXXY

SEQ ID NO: 573 - protein, 16 aa, Artificial Sequence
  Synthetically generated peptide
  VARIANT (3)..(10): Xaa = Any Amino Acid
CCXEYCCNPXACTGCY

SEQ ID NO: 574 - protein, 17 aa, Artificial Sequence
  Synthetically generated peptide
  VARIANT (3)..(10): Xaa = Any Amino Acid
  misc_feature (11)..(11): Xaa can be any naturally occurring amino acid
CCXEYCCNPXXACTGCY

SEQ ID NO: 575 - protein, 18 aa, Artificial Sequence
  Synthetically generated peptide
  VARIANT (3)..(10): Xaa = Any Amino Acid
  misc_feature (11)..(12): Xaa can be any naturally occurring amino acid
CCXEYCCNPXXXACTGCY

SEQ ID NO: 576 - protein, 18 aa, Artificial Sequence
  Synthetically generated peptide
  VARIANT (3)..(10): Xaa = Any Amino Acid
  misc_feature (11)..(11): Xaa can be any naturally occurring amino acid
  misc_feature (13)..(13): Xaa can be any naturally occurring amino acid
CCXEYCCNPXXAXCTGCY

SEQ ID NO: 577 - protein, 18 aa, Artificial Sequence
  Synthetically generated peptide
  VARIANT (3)..(10): Xaa = Any Amino Acid
  misc_feature (11)..(11): Xaa can be any naturally occurring amino acid
  misc_feature (14)..(14): Xaa can be any naturally occurring amino acid
CCXEYCCNPXXACXTGCY

SEQ ID NO: 578 - protein, 18 aa, Artificial Sequence
  Synthetically generated peptide
  VARIANT (3)..(10): Xaa = Any Amino Acid
  misc_feature (11)..(11): Xaa can be any naturally occurring amino acid
  misc_feature (15)..(15): Xaa can be any naturally occurring amino acid
CCXEYCCNPXXACTXGCY

SEQ ID NO: 579 - protein, 18 aa, Artificial Sequence
  Synthetically generated peptide
  VARIANT (3)..(10): Xaa = Any Amino Acid
  misc_feature (11)..(11): Xaa can be any naturally occurring amino acid
  misc_feature (16)..(16): Xaa can be any naturally occurring amino acid
CCXEYCCNPXXACTGXCY

SEQ ID NO: 580 - protein, 18 aa, Artificial Sequence
  Synthetically generated peptide
  VARIANT (3)..(10): Xaa = Any Amino Acid
  misc_feature (11)..(11): Xaa can be any naturally occurring amino acid
  misc_feature (17)..(17): Xaa can be any naturally occurring amino acid
CCXEYCCNPXXACTGCXY

SEQ ID NO: 581 - protein, 17 aa, Artificial Sequence
  Synthetically generated peptide
  VARIANT (3)..(10): Xaa = Any Amino Acid
  misc_feature (12)..(12): Xaa can be any naturally occurring amino acid
CCXEYCCNPXAXCTGCY

SEQ ID NO: 582 - protein, 18 aa, Artificial Sequence
  Synthetically generated peptide
  VARIANT (3)..(10): Xaa = Any Amino Acid
  misc_feature (12)..(13): Xaa can be any naturally occurring amino acid
CCXEYCCNPXAXXCTGCY

SEQ ID NO: 583 - protein, 18 aa, Artificial Sequence
  Synthetically generated peptide
  VARIANT (3)..(10): Xaa = Any Amino Acid
  misc_feature (12)..(12): Xaa can be any naturally occurring amino acid
  misc_feature (14)..(14): Xaa can be any naturally occurring amino acid
CCXEYCCNPXAXCXTGCY

SEQ ID NO: 584 - protein, 18 aa, Artificial Sequence
  Synthetically generated peptide
  VARIANT (3)..(10): Xaa = Any Amino Acid
  misc_feature (12)..(12): Xaa can be any naturally occurring amino acid
  misc_feature (15)..(15): Xaa can be any naturally occurring amino acid
CCXEYCCNPXAXCTXGCY

SEQ ID NO: 585 - protein, 18 aa, Artificial Sequence
  Synthetically generated peptide
  VARIANT (3)..(10): Xaa = Any Amino Acid
  misc_feature (12)..(12): Xaa can be any naturally occurring amino acid
  misc_feature (16)..(16): Xaa can be any naturally occurring amino acid
CCXEYCCNPXAXCTGXCY

SEQ ID NO: 586 - protein, 18 aa, Artificial Sequence
  Synthetically generated peptide
  VARIANT (3)..(10): Xaa = Any Amino Acid
  misc_feature (12)..(12): Xaa can be any naturally occurring amino acid
  misc_feature (17)..(17): Xaa can be any naturally occurring amino acid
CCXEYCCNPXAXCTGCXY

SEQ ID NO: 587 - protein, 17 aa, Artificial Sequence
  Synthetically generated peptide
  VARIANT (3)..(10): Xaa = Any Amino Acid
  misc_feature (13)..(13): Xaa can be any naturally occurring amino acid
CCXEYCCNPXACXTGCY

SEQ ID NO: 588 - protein, 18 aa, Artificial Sequence
  Synthetically generated peptide
  VARIANT (3)..(10): Xaa = Any Amino Acid
  misc_feature (13)..(14): Xaa can be any naturally occurring amino acid
CCXEYCCNPXACXXTGCY

SEQ ID NO: 589 - protein, 18 aa, Artificial Sequence
  Synthetically generated peptide
  VARIANT (3)..(10): Xaa = Any Amino Acid
  misc_feature (13)..(13): Xaa can be any naturally occurring amino acid
  misc_feature (15)..(15): Xaa can be any naturally occurring amino acid
CCXEYCCNPXACXTXGCY

SEQ ID NO: 590 - protein, 18 aa, Artificial Sequence
  Synthetically generated peptide
  VARIANT (3)..(10): Xaa = Any Amino Acid
  misc_feature (13)..(13): Xaa can be any naturally occurring amino acid
  misc_feature (16)..(16): Xaa can be any naturally occurring amino acid
CCXEYCCNPXACXTGXCY

SEQ ID NO: 591 - protein, 18 aa, Artificial Sequence
  Synthetically generated peptide
  VARIANT (3)..(10): Xaa = Any Amino Acid
  misc_feature (13)..(13): Xaa can be any naturally occurring amino acid
  misc_feature (17)..(17): Xaa can be any naturally occurring amino acid
CCXEYCCNPXACXTGCXY

SEQ ID NO: 592 - protein, 17 aa, Artificial Sequence
  Synthetically generated peptide
  VARIANT (3)..(10): Xaa = Any Amino Acid
  misc_feature (14)..(14): Xaa can be any naturally occurring amino acid
CCXEYCCNPXACTXGCY

SEQ ID NO: 593 - protein, 18 aa, Artificial Sequence
  Synthetically generated peptide
  VARIANT (3)..(10): Xaa = Any Amino Acid
  misc_feature (14)..(15): Xaa can be any naturally occurring amino acid
CCXEYCCNPXACTXXGCY

SEQ ID NO: 594 - protein, 18 aa, Artificial Sequence
  Synthetically generated peptide
  VARIANT (3)..(10): Xaa = Any Amino Acid
  misc_feature (14)..(14): Xaa can be any naturally occurring amino acid
  misc_feature (16)..(16): Xaa can be any naturally occurring amino acid
CCXEYCCNPXACTXGXCY

SEQ ID NO: 595 - protein, 18 aa, Artificial Sequence
  Synthetically generated peptide
  VARIANT (3)..(10): Xaa = Any Amino Acid
  misc_feature (14)..(14): Xaa can be any naturally occurring amino acid
  misc_feature (17)..(17): Xaa can be any naturally occurring amino acid
CCXEYCCNPXACTXGCXY

SEQ ID NO: 596 - protein, 17 aa, Artificial Sequence
  Synthetically generated peptide
  VARIANT (3)..(10): Xaa = Any Amino Acid
  misc_feature (15)..(15): Xaa can be any naturally occurring amino acid
CCXEYCCNPXACTGXCY

SEQ ID NO: 597 - protein, 18 aa, Artificial Sequence
  Synthetically generated peptide
  VARIANT (3)..(10): Xaa = Any Amino Acid
  misc_feature (15)..(16): Xaa can be any naturally occurring amino acid
CCXEYCCNPXACTGXXCY

SEQ ID NO: 598 - protein, 18 aa, Artificial Sequence
  Synthetically generated peptide
  VARIANT (3)..(10): Xaa = Any Amino Acid
  misc_feature (15)..(15): Xaa can be any naturally occurring amino acid
  misc_feature (17)..(17): Xaa can be any naturally occurring amino acid
CCXEYCCNPXACTGXCXY

SEQ ID NO: 599 - protein, 17 aa, Artificial Sequence
  Synthetically generated peptide
  VARIANT (3)..(10): Xaa = Any Amino Acid
  misc_feature (16)..(16): Xaa can be any naturally occurring amino acid
CCXEYCCNPXACTGCXY

SEQ ID NO: 600 - protein, 18 aa, Artificial Sequence
  Synthetically generated peptide
  VARIANT (3)..(10): Xaa = Any Amino Acid
  misc_feature (16)..(17): Xaa can be any naturally occurring amino acid
CCXEYCCNPXACTGCXXY

SEQ ID NO: 601 - protein, 16 aa, Artificial Sequence
  Synthetically generated peptide
  VARIANT (3)..(11): Xaa = Any Amino Acid
CCXEYCCNPAXCTGCY

SEQ ID NO: 602 - protein, 17 aa, Artificial Sequence
  Synthetically generated peptide
  VARIANT (3)..(11): Xaa = Any Amino Acid
  misc_feature (12)..(12): Xaa can be any naturally occurring amino acid
CCXEYCCNPAXXCTGCY

SEQ ID NO: 603 - protein, 18 aa, Artificial Sequence
  Synthetically generated peptide
  VARIANT (3)..(11): Xaa = Any Amino Acid
  misc_feature (12)..(13): Xaa can be any naturally occurring amino acid
CCXEYCCNPAXXXCTGCY

SEQ ID NO: 604 - protein, 18 aa, Artificial Sequence
  Synthetically generated peptide
  VARIANT (3)..(11): Xaa = Any Amino Acid
  misc_feature (12)..(12): Xaa can be any naturally occurring amino acid
  misc_feature (14)..(14): Xaa can be any naturally occurring amino acid
CCXEYCCNPAXXCXTGCY

SEQ ID NO: 605 - protein, 18 aa, Artificial Sequence
  Synthetically generated peptide
  VARIANT (3)..(11): Xaa = Any Amino Acid
  misc_feature (12)..(12): Xaa can be any naturally occurring amino acid
  misc_feature (15)..(15): Xaa can be any naturally occurring amino acid
CCXEYCCNPAXXCTXGCY

SEQ ID NO: 606 - protein, 18 aa, Artificial Sequence
  Synthetically generated peptide
  VARIANT (3)..(11): Xaa = Any Amino Acid
  misc_feature (12)..(12): Xaa can be any naturally occurring amino acid
  misc_feature (16)..(16): Xaa can be any naturally occurring amino acid
CCXEYCCNPAXXCTGXCY

SEQ ID NO: 607 - protein, 18 aa, Artificial Sequence
  Synthetically generated peptide
  VARIANT (3)..(11): Xaa = Any Amino Acid
  misc_feature (12)..(12): Xaa can be any naturally occurring amino acid
  misc_feature (17)..(17): Xaa can be any naturally occurring amino acid
CCXEYCCNPAXXCTGCXY

SEQ ID NO: 608 - protein, 17 aa, Artificial Sequence
  Synthetically generated peptide
  VARIANT (3)..(11): Xaa = Any Amino Acid
  misc_feature (13)..(13): Xaa can be any naturally occurring amino acid
CCXEYCCNPAXCXTGCY

SEQ ID NO: 609 - protein, 18 aa, Artificial Sequence
  Synthetically generated peptide
  VARIANT (3)..(11): Xaa = Any Amino Acid
  misc_feature (13)..(14): Xaa can be any naturally occurring amino acid
CCXEYCCNPAXCXXTGCY

SEQ ID NO: 610 - protein, 18 aa, Artificial Sequence
  Synthetically generated peptide
  VARIANT (3)..(11): Xaa = Any Amino Acid
  misc_feature (13)..(13): Xaa can be any naturally occurring amino acid
  misc_feature (15)..(15): Xaa can be any naturally occurring amino acid
CCXEYCCNPAXCXTXGCY

SEQ ID NO: 611 - protein, 18 aa, Artificial Sequence
  Synthetically generated peptide
  VARIANT (3)..(11): Xaa = Any Amino Acid
  misc_feature (13)..(13): Xaa can be any naturally occurring amino acid
  misc_feature (16)..(16): Xaa can be any naturally occurring amino acid
CCXEYCCNPAXCXTGXCY

SEQ ID NO: 612 - protein, 18 aa, Artificial Sequence
  Synthetically generated peptide
  VARIANT (3)..(11): Xaa = Any Amino Acid
  misc_feature (13)..(13): Xaa can be any naturally occurring amino acid
  misc_feature (17)..(17): Xaa can be any naturally occurring amino acid
CCXEYCCNPAXCXTGCXY

SEQ ID NO: 613 - protein, 17 aa, Artificial Sequence
  Synthetically generated peptide
  VARIANT (3)..(11): Xaa = Any Amino Acid
  misc_feature (14)..(14): Xaa can be any naturally occurring amino acid
CCXEYCCNPAXCTXGCY

SEQ ID NO: 614 - protein, 18 aa, Artificial Sequence
  Synthetically generated peptide
  VARIANT (3)..(11): Xaa = Any Amino Acid
  misc_feature (14)..(15): Xaa can be any naturally occurring amino acid
CCXEYCCNPAXCTXXGCY

SEQ ID NO: 615 - protein, 18 aa, Artificial Sequence
  Synthetically generated peptide
  VARIANT (3)..(11): Xaa = Any Amino Acid
  misc_feature (14)..(14): Xaa can be any naturally occurring amino acid
  misc_feature (16)..(16): Xaa can be any naturally occurring amino acid
CCXEYCCNPAXCTXGXCY

SEQ ID NO: 616 - protein, 18 aa, Artificial Sequence
  Synthetically generated peptide
  VARIANT (3)..(11): Xaa = Any Amino Acid
  misc_feature (14)..(14): Xaa can be any naturally occurring amino acid
  misc_feature (17)..(17): Xaa can be any naturally occurring amino acid
CCXEYCCNPAXCTXGCXY

SEQ ID NO: 617 - protein, 17 aa, Artificial Sequence
  Synthetically generated peptide
  VARIANT (3)..(11): Xaa = Any Amino Acid
  misc_feature (15)..(15): Xaa can be any naturally occurring amino acid
CCXEYCCNPAXCTGXCY

SEQ ID NO: 618 - protein, 18 aa, Artificial Sequence
  Synthetically generated peptide
  VARIANT (3)..(11): Xaa = Any Amino Acid
  misc_feature (15)..(16): Xaa can be any naturally occurring amino acid
CCXEYCCNPAXCTGXXCY

SEQ ID NO: 619 - protein, 18 aa, Artificial Sequence
  Synthetically generated peptide
  VARIANT (3)..(11): Xaa = Any Amino Acid
  misc_feature (15)..(15): Xaa can be any naturally occurring amino acid
  misc_feature (17)..(17): Xaa can be any naturally occurring amino acid
CCXEYCCNPAXCTGXCXY

SEQ ID NO: 620 - protein, 17 aa, Artificial Sequence
  Synthetically generated peptide
  VARIANT (3)..(11): Xaa = Any Amino Acid
  misc_feature (16)..(16): Xaa can be any naturally occurring amino acid
CCXEYCCNPAXCTGCXY

SEQ ID NO: 621 - protein, 18 aa, Artificial Sequence
  Synthetically generated peptide
  VARIANT (3)..(11): Xaa = Any Amino Acid
  misc_feature (16)..(17): Xaa can be any naturally occurring amino acid
CCXEYCCNPAXCTGCXXY

SEQ ID NO: 622 - protein, 16 aa, Artificial Sequence
  Synthetically generated peptide
  VARIANT (3)..(12): Xaa = Any Amino Acid
CCXEYCCNPACXTGCY

SEQ ID NO: 623 - protein, 17 aa, Artificial Sequence
  Synthetically generated peptide
  VARIANT (3)..(12): Xaa = Any Amino Acid
  misc_feature (13)..(13): Xaa can be any naturally occurring amino acid
CCXEYCCNPACXXTGCY

SEQ ID NO: 624 - protein, 18 aa, Artificial Sequence
  Synthetically generated peptide
  VARIANT (3)..(12): Xaa = Any Amino Acid
  misc_feature (13)..(14): Xaa can be any naturally occurring amino acid
CCXEYCCNPACXXXTGCY

SEQ ID NO: 625 - protein, 18 aa, Artificial Sequence
  Synthetically generated peptide
  VARIANT (3)..(12): Xaa = Any Amino Acid
  misc_feature (13)..(13): Xaa can be any naturally occurring amino acid
  misc_feature (15)..(15): Xaa can be any naturally occurring amino acid
CCXEYCCNPACXXTXGCY

SEQ ID NO: 626 - protein, 18 aa, Artificial Sequence
  Synthetically generated peptide
  VARIANT (3)..(12): Xaa = Any Amino Acid
  misc_feature (13)..(13): Xaa can be any naturally occurring amino acid
  misc_feature (16)..(16): Xaa can be any naturally occurring amino acid
CCXEYCCNPACXXTGXCY

SEQ ID NO: 627 - protein, 18 aa, Artificial Sequence
  Synthetically generated peptide
  VARIANT (3)..(12): Xaa = Any Amino Acid
  misc_feature (13)..(13): Xaa can be any naturally occurring amino acid
  misc_feature (17)..(17): Xaa can be any naturally occurring amino acid
CCXEYCCNPACXXTGCXY

SEQ ID NO: 628 - protein, 17 aa, Artificial Sequence
  Synthetically generated peptide
  VARIANT (3)..(12): Xaa = Any Amino Acid
  misc_feature (14)..(14): Xaa can be any naturally occurring amino acid
CCXEYCCNPACXTXGCY

SEQ ID NO: 629 - protein, 18 aa, Artificial Sequence
  Synthetically generated peptide
  VARIANT (3)..(12): Xaa = Any Amino Acid
  misc_feature (14)..(15): Xaa can be any naturally occurring amino acid
CCXEYCCNPACXTXXGCY

SEQ ID NO: 630 - protein, 18 aa, Artificial Sequence
  Synthetically generated peptide
  VARIANT (3)..(12): Xaa = Any Amino Acid
  misc_feature (14)..(14): Xaa can be any naturally occurring amino acid
  misc_feature (16)..(16): Xaa can be any naturally occurring amino acid
CCXEYCCNPACXTXGXCY

SEQ ID NO: 631 - protein, 18 aa, Artificial Sequence
  Synthetically generated peptide
  VARIANT (3)..(12): Xaa = Any Amino Acid
  misc_feature (14)..(14): Xaa can be any naturally occurring amino acid
  misc_feature (17)..(17): Xaa can be any naturally occurring amino acid
CCXEYCCNPACXTXGCXY

SEQ ID NO: 632 - protein, 17 aa, Artificial Sequence
  Synthetically generated peptide
  VARIANT (3)..(12): Xaa = Any Amino Acid
  misc_feature (15)..(15): Xaa can be any naturally occurring amino acid
CCXEYCCNPACXTGXCY

SEQ ID NO: 633 - protein, 18 aa, Artificial Sequence
  Synthetically generated peptide
  VARIANT (3)..(12): Xaa = Any Amino Acid
  misc_feature (15)..(16): Xaa can be any naturally occurring amino acid
CCXEYCCNPACXTGXXCY

SEQ ID NO: 634 - protein, 18 aa, Artificial Sequence
  Synthetically generated peptide
  VARIANT (3)..(12): Xaa = Any Amino Acid
  misc_feature (15)..(15): Xaa can be any naturally occurring amino acid
  misc_feature (17)..(17): Xaa can be any naturally occurring amino acid
CCXEYCCNPACXTGXCXY

SEQ ID NO: 635 - protein, 17 aa, Artificial Sequence
  Synthetically generated peptide
  VARIANT (3)..(12): Xaa = Any Amino Acid
  misc_feature (16)..(16): Xaa can be any naturally occurring amino acid
CCXEYCCNPACXTGCXY

SEQ ID NO: 636 - protein, 18 aa, Artificial Sequence
  Synthetically generated peptide
  VARIANT (3)..(12): Xaa = Any Amino Acid
  misc_feature (16)..(17): Xaa can be any naturally occurring amino acid
CCXEYCCNPACXTGCXXY

SEQ ID NO: 637 - protein, 16 aa, Artificial Sequence
  Synthetically generated peptide
  VARIANT (3)..(13): Xaa = Any Amino Acid
CCXEYCCNPACTXGCY

SEQ ID NO: 638 - protein, 17 aa, Artificial Sequence
  Synthetically generated peptide
  VARIANT (3)..(13): Xaa = Any Amino Acid
  misc_feature (14)..(14): Xaa can be any naturally occurring amino acid
CCXEYCCNPACTXXGCY

SEQ ID NO: 639 - protein, 18 aa, Artificial Sequence
  Synthetically generated peptide
  VARIANT (3)..(13): Xaa = Any Amino Acid
  misc_feature (14)..(15): Xaa can be any naturally occurring amino acid
CCXEYCCNPACTXXXGCY

SEQ ID NO: 640 - protein, 18 aa, Artificial Sequence
  Synthetically generated peptide
  VARIANT (3)..(13): Xaa = Any Amino Acid
  misc_feature (14)..(14): Xaa can be any naturally occurring amino acid
  misc_feature (16)..(16): Xaa can be any naturally occurring amino acid
CCXEYCCNPACTXXGXCY

SEQ ID NO: 641 - protein, 18 aa, Artificial Sequence
  Synthetically generated peptide
  VARIANT (3)..(13): Xaa = Any Amino Acid
  misc_feature (14)..(14): Xaa can be any naturally occurring amino acid
  misc_feature (17)..(17): Xaa can be any naturally occurring amino acid
CCXEYCCNPACTXXGCXY

SEQ ID NO: 642 - protein, 17 aa, Artificial Sequence
  Synthetically generated peptide
  VARIANT (3)..(13): Xaa = Any Amino Acid
  misc_feature (15)..(15): Xaa can be any naturally occurring amino acid
CCXEYCCNPACTXGXCY

SEQ ID NO: 643 - protein, 18 aa, Artificial Sequence
  Synthetically generated peptide
  VARIANT (3)..(13): Xaa = Any Amino Acid
  misc_feature (15)..(16): Xaa can be any naturally occurring amino acid
CCXEYCCNPACTXGXXCY

SEQ ID NO: 644 - protein, 18 aa, Artificial Sequence
  Synthetically generated peptide
  VARIANT (3)..(13): Xaa = Any Amino Acid
  misc_feature (15)..(15): Xaa can be any naturally occurring amino acid
  misc_feature (17)..(17): Xaa can be any naturally occurring amino acid
CCXEYCCNPACTXGXCXY

SEQ ID NO: 645 - protein, 17 aa, Artificial Sequence
  Synthetically generated peptide
  VARIANT (3)..(13): Xaa = Any Amino Acid
  misc_feature (16)..(16): Xaa can be any naturally occurring amino acid
CCXEYCCNPACTXGCXY

SEQ ID NO: 646 - protein, 18 aa, Artificial Sequence
  Synthetically generated peptide
  VARIANT (3)..(13): Xaa = Any Amino Acid
  misc_feature (16)..(17): Xaa can be any naturally occurring amino acid
CCXEYCCNPACTXGCXXY

SEQ ID NO: 647 - protein, 16 aa, Artificial Sequence
  Synthetically generated peptide
  VARIANT (3)..(14): Xaa = Any Amino Acid
CCXEYCCNPACTGXCY

SEQ ID NO: 648 - protein, 17 aa, Artificial Sequence
  Synthetically generated peptide
  VARIANT (3)..(14): Xaa = Any Amino Acid
  misc_feature (15)..(15): Xaa can be any naturally occurring amino acid
CCXEYCCNPACTGXXCY

SEQ ID NO: 649 - protein, 18 aa, Artificial Sequence
  Synthetically generated peptide
  VARIANT (3)..(14): Xaa = Any Amino Acid
  misc_feature (15)..(16): Xaa can be any naturally occurring amino acid
CCXEYCCNPACTGXXXCY

SEQ ID NO: 650 - protein, 18 aa, Artificial Sequence
  Synthetically generated peptide
  VARIANT (3)..(14): Xaa = Any Amino Acid
  misc_feature (15)..(15): Xaa can be any naturally occurring amino acid
  misc_feature (17)..(17): Xaa can be any naturally occurring amino acid
CCXEYCCNPACTGXXCXY

SEQ ID NO: 651 - protein, 17 aa, Artificial Sequence
  Synthetically generated peptide
  VARIANT (3)..(14): Xaa = Any Amino Acid
  misc_feature (16)..(16): Xaa can be any naturally occurring amino acid
CCXEYCCNPACTGXCXY

SEQ ID NO: 652 - protein, 18 aa, Artificial Sequence
  Synthetically generated peptide
  VARIANT (3)..(14): Xaa = Any Amino Acid
  misc_feature (16)..(17): Xaa can be any naturally occurring amino acid
CCXEYCCNPACTGXCXXY

SEQ ID NO: 653 - protein, 16 aa, Artificial Sequence
  Synthetically generated peptide
  VARIANT (3)..(15): Xaa = Any Amino Acid
CCXEYCCNPACTGCXY

SEQ ID NO: 654 - protein, 17 aa, Artificial Sequence
  Synthetically generated peptide
  VARIANT (3)..(15): Xaa = Any Amino Acid
  misc_feature (16)..(16): Xaa can be any naturally occurring amino acid
CCXEYCCNPACTGCXXY

SEQ ID NO: 655 - protein, 18 aa, Artificial Sequence
  Synthetically generated peptide
  VARIANT (3)..(15): Xaa = Any Amino Acid
  misc_feature (16)..(17): Xaa can be any naturally occurring amino acid
CCXEYCCNPACTGCXXXY

SEQ ID NO: 656 - protein, 15 aa, Artificial Sequence
  Synthetically generated peptide
  VARIANT (4)..(4): Xaa = Any Amino Acid
CCEXYCCNPACTGCY

SEQ ID NO: 657 - protein, 16 aa, Artificial Sequence
  Synthetically generated peptide
  VARIANT (4)..(5): Xaa = Any Amino Acid
CCEXXYCCNPACTGCY

SEQ ID NO: 658 - protein, 17 aa, Artificial Sequence
  Synthetically generated peptide
  VARIANT (4)..(5): Xaa = Any Amino Acid
  misc_feature (6)..(6): Xaa can be any naturally occurring amino acid
CCEXXXYCCNPACTGCY

SEQ ID NO: 659 - protein, 18 aa, Artificial Sequence
  Synthetically generated peptide
  VARIANT (4)..(5): Xaa = Any Amino Acid
  misc_feature (6)..(7): Xaa can be any naturally occurring amino acid
CCEXXXXYCCNPACTGCY

SEQ ID NO: 660 - protein, 18 aa, Artificial Sequence
  Synthetically generated peptide
  VARIANT (4)..(5): Xaa = Any Amino Acid
  misc_feature (6)..(6): Xaa can be any naturally occurring amino acid
  misc_feature (8)..(8): Xaa can be any naturally occurring amino acid
CCEXXXYXCCNPACTGCY

SEQ ID NO: 661 - protein, 18 aa, Artificial Sequence
  Synthetically generated peptide
  VARIANT (4)..(5): Xaa = Any Amino Acid
  misc_feature (6)..(6): Xaa can be any naturally occurring amino acid
  misc_feature (10)..(10): Xaa can be any naturally occurring amino acid
CCEXXXYCCXNPACTGCY

SEQ ID NO: 662 - protein, 18 aa, Artificial Sequence
  Synthetically generated peptide
  VARIANT (4)..(5): Xaa = Any Amino Acid
  misc_feature (6)..(6): Xaa can be any naturally occurring amino acid
  misc_feature (11)..(11): Xaa can be any naturally occurring amino acid
CCEXXXYCCNXPACTGCY

SEQ ID NO: 663 - protein, 18 aa, Artificial Sequence
  Synthetically generated peptide
  VARIANT (4)..(5): Xaa = Any Amino Acid
  misc_feature (6)..(6): Xaa can be any naturally occurring amino acid
  misc_feature (12)..(12): Xaa can be any naturally occurring amino acid
CCEXXXYCCNPXACTGCY

SEQ ID NO: 664 - protein, 18 aa, Artificial Sequence
  Synthetically generated peptide
  VARIANT (4)..(5): Xaa = Any Amino Acid
  misc_feature (6)..(6): Xaa can be any naturally occurring amino acid
  misc_feature (13)..(13): Xaa can be any naturally occurring amino acid
CCEXXXYCCNPAXCTGCY

SEQ ID NO: 665 - protein, 18 aa, Artificial Sequence
  Synthetically generated peptide
  VARIANT (4)..(5): Xaa = Any Amino Acid
  misc_feature (6)..(6): Xaa can be any naturally occurring amino acid
  misc_feature (14)..(14): Xaa can be any naturally occurring amino acid
CCEXXXYCCNPACXTGCY

SEQ ID NO: 666 - protein, 18 aa, Artificial Sequence
  Synthetically generated peptide
  VARIANT (4)..(5): Xaa = Any Amino Acid
  misc_feature (6)..(6): Xaa can be any naturally occurring amino acid
  misc_feature (15)..(15): Xaa can be any naturally occurring amino acid
CCEXXXYCCNPACTXGCY

SEQ ID NO: 667 - protein, 18 aa, Artificial Sequence
  Synthetically generated peptide
  VARIANT (4)..(5): Xaa = Any Amino Acid
  misc_feature (6)..(6): Xaa can be any naturally occurring amino acid
  misc_feature (16)..(16): Xaa can be any naturally occurring amino acid
CCEXXXYCCNPACTGXCY

SEQ ID NO: 668 - protein, 18 aa, Artificial Sequence
  Synthetically generated peptide
  VARIANT (4)..(5): Xaa = Any Amino Acid
  misc_feature (6)..(6): Xaa can be any naturally occurring amino acid
  misc_feature (17)..(17): Xaa can be any naturally occurring amino acid
CCEXXXYCCNPACTGCXY

SEQ ID NO: 669 - protein, 17 aa, Artificial Sequence
  Synthetically generated peptide
  VARIANT (4)..(5): Xaa = Any Amino Acid
  misc_feature (7)..(7): Xaa can be any naturally occurring amino acid
CCEXXYXCCNPACTGCY

SEQ ID NO: 670 - protein, 18 aa, Artificial Sequence
  Synthetically generated peptide
  VARIANT (4)..(5): Xaa = Any Amino Acid
  misc_feature (7)..(8): Xaa can be any naturally occurring amino acid
CCEXXYXXCCNPACTGCY

SEQ ID NO: 671 - protein, 18 aa, Artificial Sequence
  Synthetically generated peptide
  VARIANT (4)..(5): Xaa = Any Amino Acid
  misc_feature (7)..(7): Xaa can be any naturally occurring amino acid
  misc_feature (10)..(10): Xaa can be any naturally occurring amino acid
CCEXXYXCCXNPACTGCY

SEQ ID NO: 672 - protein, 18 aa, Artificial Sequence
  Synthetically generated peptide
  VARIANT (4)..(5): Xaa = Any Amino Acid
  misc_feature (7)..(7): Xaa can be any naturally occurring amino acid
  misc_feature (11)..(11): Xaa can be any naturally occurring amino acid
CCEXXYXCCNXPACTGCY

SEQ ID NO: 673 - protein, 18 aa, Artificial Sequence
  Synthetically generated peptide
  VARIANT (4)..(5): Xaa = Any Amino Acid
  misc_feature (7)..(7): Xaa can be any naturally occurring amino acid
  misc_feature (12)..(12): Xaa can be any naturally occurring amino acid
CCEXXYXCCNPXACTGCY

SEQ ID NO: 674 - protein, 18 aa, Artificial Sequence
  Synthetically generated peptide
  VARIANT (4)..(5): Xaa = Any Amino Acid
  misc_feature (7)..(7): Xaa can be any naturally occurring amino acid
  misc_feature (13)..(13): Xaa can be any naturally occurring amino acid
CCEXXYXCCNPAXCTGCY

SEQ ID NO: 675 - protein, 18 aa, Artificial Sequence
  Synthetically generated peptide
  VARIANT (4)..(5): Xaa = Any Amino Acid
  misc_feature (7)..(7): Xaa can be any naturally occurring amino acid
  misc_feature (14)..(14): Xaa can be any naturally occurring amino acid
CCEXXYXCCNPACXTGCY

SEQ ID NO: 676 - protein, 18 aa, Artificial Sequence
  Synthetically generated peptide
  VARIANT (4)..(5): Xaa = Any Amino Acid
  misc_feature (7)..(7): Xaa can be any naturally occurring amino acid
  misc_feature (15)..(15): Xaa can be any naturally occurring amino acid
CCEXXYXCCNPACTXGCY

SEQ ID NO: 677 - protein, 18 aa, Artificial Sequence
  Synthetically generated peptide
  VARIANT (4)..(5): Xaa = Any Amino Acid
  misc_feature (7)..(7): Xaa can be any naturally occurring amino acid
  misc_feature (16)..(16): Xaa can be any naturally occurring amino acid
CCEXXYXCCNPACTGXCY

SEQ ID NO: 678 - protein, 18 aa, Artificial Sequence
  Synthetically generated peptide
  VARIANT (4)..(5): Xaa = Any Amino Acid
  misc_feature (7)..(7): Xaa can be any naturally occurring amino acid
  misc_feature (17)..(17): Xaa can be any naturally occurring amino acid
CCEXXYXCCNPACTGCXY

SEQ ID NO: 679 - protein, 17 aa, Artificial Sequence
  Synthetically generated peptide
  VARIANT (4)..(5): Xaa = Any Amino Acid
  misc_feature (9)..(9): Xaa can be any naturally occurring amino acid
CCEXXYCCXNPACTGCY

SEQ ID NO: 680 - protein, 18 aa, Artificial Sequence
  Synthetically generated peptide
  VARIANT (4)..(5): Xaa = Any Amino Acid
  misc_feature (9)..(10): Xaa can be any naturally occurring amino acid
CCEXXYCCXXNPACTGCY

SEQ ID NO: 681 - protein, 18 aa, Artificial Sequence
  Synthetically generated peptide
  VARIANT (4)..(5): Xaa = Any Amino Acid
  misc_feature (9)..(9): Xaa can be any naturally occurring amino acid
  misc_feature (11)..(11): Xaa can be any naturally occurring amino acid
CCEXXYCCXNXPACTGCY

SEQ ID NO: 682 - protein, 18 aa, Artificial Sequence
  Synthetically generated peptide
  VARIANT (4)..(5): Xaa = Any Amino Acid
  misc_feature (9)..(9): Xaa can be any naturally occurring amino acid
  misc_feature (12)..(12): Xaa can be any naturally occurring amino acid
CCEXXYCCXNPXACTGCY

SEQ ID NO: 683 - protein, 18 aa, Artificial Sequence
  Synthetically generated peptide
  VARIANT (4)..(5): Xaa = Any Amino Acid
  misc_feature (9)..(9): Xaa can be any naturally occurring amino acid
  misc_feature (13)..(13): Xaa can be any naturally occurring amino acid
CCEXXYCCXNPAXCTGCY

SEQ ID NO: 684 - protein, 18 aa, Artificial Sequence
  Synthetically generated peptide
  VARIANT (4)..(5): Xaa = Any Amino Acid
  misc_feature (9)..(9): Xaa can be any naturally occurring amino acid
  misc_feature (14)..(14): Xaa can be any naturally occurring amino acid
CCEXXYCCXNPACXTGCY

SEQ ID NO: 685 - protein, 18 aa, Artificial Sequence
  Synthetically generated peptide
  VARIANT (4)..(5): Xaa = Any Amino Acid
  misc_feature (9)..(9): Xaa can be any naturally occurring amino acid
  misc_feature (15)..(15): Xaa can be any naturally occurring amino acid
CCEXXYCCXNPACTXGCY

SEQ ID NO: 686 - protein, 18 aa, Artificial Sequence
  Synthetically generated peptide
  VARIANT (4)..(5): Xaa = Any Amino Acid
  misc_feature (9)..(9): Xaa can be any naturally occurring amino acid
  misc_feature (16)..(16): Xaa can be any naturally occurring amino acid
CCEXXYCCXNPACTGXCY

SEQ ID NO: 687 - protein, 18 aa, Artificial Sequence
  Synthetically generated peptide
  VARIANT (4)..(5): Xaa = Any Amino Acid
  misc_feature (9)..(9): Xaa can be any naturally occurring amino acid
  misc_feature (17)..(17): Xaa can be any naturally occurring amino acid
CCEXXYCCXNPACTGCXY

SEQ ID NO: 688 - protein, 17 aa, Artificial Sequence
  Synthetically generated peptide
  VARIANT (4)..(5): Xaa = Any Amino Acid
  misc_feature (10)..(10): Xaa can be any naturally occurring amino acid
CCEXXYCCNXPACTGCY

SEQ ID NO: 689 - protein, 18 aa, Artificial Sequence
  Synthetically generated peptide
  VARIANT (4)..(5): Xaa = Any Amino Acid
  misc_feature (10)..(11): Xaa can be any naturally occurring amino acid
CCEXXYCCNXXPACTGCY

SEQ ID NO: 690 - protein, 18 aa, Artificial Sequence
  Synthetically generated peptide
  VARIANT (4)..(5): Xaa = Any Amino Acid
  misc_feature (10)..(10): Xaa can be any naturally occurring amino acid
  misc_feature (12)..(12): Xaa can be any naturally occurring amino acid
CCEXXYCCNXPXACTGCY

SEQ ID NO: 691 - protein, 18 aa, Artificial Sequence
  Synthetically generated peptide
  VARIANT (4)..(5): Xaa = Any Amino Acid
  misc_feature (10)..(10): Xaa can be any naturally occurring amino acid
  misc_feature (13)..(13): Xaa can be any naturally occurring amino acid
CCEXXYCCNXPAXCTGCY

SEQ ID NO: 692 - protein, 18 aa, Artificial Sequence
  Synthetically generated peptide
  VARIANT (4)..(5): Xaa = Any Amino Acid
  misc_feature (10)..(10): Xaa can be any naturally occurring amino acid
  misc_feature (14)..(14): Xaa can be any naturally occurring amino acid
CCEXXYCCNXPACXTGCY

SEQ ID NO: 693 - protein, 18 aa, Artificial Sequence
  Synthetically generated peptide
  VARIANT (4)..(5): Xaa = Any Amino Acid
  misc_feature (10)..(10): Xaa can be any naturally occurring amino acid
  misc_feature (15)..(15): Xaa can be any naturally occurring amino acid
CCEXXYCCNXPACTXGCY

SEQ ID NO: 694 - protein, 18 aa, Artificial Sequence
  Synthetically generated peptide
  VARIANT (4)..(5): Xaa = Any Amino Acid
  misc_feature (10)..(10): Xaa can be any naturally occurring amino acid
  misc_feature (16)..(16): Xaa can be any naturally occurring amino acid
CCEXXYCCNXPACTGXCY

SEQ ID NO: 695 - protein, 18 aa, Artificial Sequence
  Synthetically generated peptide
  VARIANT (4)..(5): Xaa = Any Amino Acid
  misc_feature (10)..(10): Xaa can be any naturally occurring amino acid
  misc_feature (17)..(17): Xaa can be any naturally occurring amino acid
CCEXXYCCNXPACTGCXY

SEQ ID NO: 696 - protein, 17 aa, Artificial Sequence
  Synthetically generated peptide
  VARIANT (4)..(5): Xaa = Any Amino Acid
  misc_feature (11)..(11): Xaa can be any naturally occurring amino acid
CCEXXYCCNPXACTGCY

SEQ ID NO: 697 - protein, 18 aa, Artificial Sequence
  Synthetically generated peptide
  VARIANT (4)..(5): Xaa = Any Amino Acid
  misc_feature (11)..(12): Xaa can be any naturally occurring amino acid
CCEXXYCCNPXXACTGCY

SEQ ID NO: 698 - protein, 18 aa, Artificial Sequence
  Synthetically generated peptide
  VARIANT (4)..(5): Xaa = Any Amino Acid
  misc_feature (11)..(11): Xaa can be any naturally occurring amino acid
  misc_feature (13)..(13): Xaa can be any naturally occurring amino acid
CCEXXYCCNPXAXCTGCY

SEQ ID NO: 699 - protein, 18 aa, Artificial Sequence
  Synthetically generated peptide
  VARIANT (4)..(5): Xaa = Any Amino Acid
  misc_feature (11)..(11): Xaa can be any naturally occurring amino acid
  misc_feature (14)..(14): Xaa can be any naturally occurring amino acid
CCEXXYCCNPXACXTGCY

SEQ ID NO: 700 - protein, 18 aa, Artificial Sequence
  Synthetically generated peptide
  VARIANT (4)..(5): Xaa = Any Amino Acid
  misc_feature (11)..(11): Xaa can be any naturally occurring amino acid
  misc_feature (15)..(15): Xaa can be any naturally occurring amino acid
CCEXXYCCNPXACTXGCY

SEQ ID NO: 701 - protein, 18 aa, Artificial Sequence
  Synthetically generated peptide
  VARIANT (4)..(5): Xaa = Any Amino Acid
  misc_feature (11)..(11): Xaa can be any naturally occurring amino acid
  misc_feature (16)..(16): Xaa can be any naturally occurring amino acid
CCEXXYCCNPXACTGXCY

SEQ ID NO: 702 - protein, 18 aa, Artificial Sequence
  Synthetically generated peptide
  VARIANT (4)..(5): Xaa = Any Amino Acid
  misc_feature (11)..(11): Xaa can be any naturally occurring amino acid
  misc_feature (17)..(17): Xaa can be any naturally occurring amino acid
CCEXXYCCNPXACTGCXY

SEQ ID NO: 703 - protein, 17 aa, Artificial Sequence
  Synthetically generated peptide
  VARIANT (4)..(5): Xaa = Any Amino Acid
  misc_feature (12)..(12): Xaa can be any naturally occurring amino acid
CCEXXYCCNPAXCTGCY

SEQ ID NO: 704 - protein, 18 aa, Artificial Sequence
  Synthetically generated peptide
  VARIANT (4)..(5): Xaa = Any Amino Acid
  misc_feature (12)..(13): Xaa can be any naturally occurring amino acid
CCEXXYCCNPAXXCTGCY

SEQ ID NO: 705 - protein, 18 aa, Artificial Sequence
  Synthetically generated peptide
  VARIANT (4)..(5): Xaa = Any Amino Acid
  misc_feature (12)..(12): Xaa can be any naturally occurring amino acid
  misc_feature (14)..(14): Xaa can be any naturally occurring amino acid
CCEXXYCCNPAXCXTGCY

SEQ ID NO: 706 - protein, 18 aa, Artificial Sequence
  Synthetically generated peptide
  VARIANT (4)..(5): Xaa = Any Amino Acid
  misc_feature (12)..(12): Xaa can be any naturally occurring amino acid
  misc_feature (15)..(15): Xaa can be any naturally occurring amino acid
CCEXXYCCNPAXCTXGCY

SEQ ID NO: 707 - protein, 18 aa, Artificial Sequence
  Synthetically generated peptide
  VARIANT (4)..(5): Xaa = Any Amino Acid
  misc_feature (12)..(12): Xaa can be any naturally occurring amino acid
  misc_feature (16)..(16): Xaa can be any naturally occurring amino acid
CCEXXYCCNPAXCTGXCY

SEQ ID NO: 708 - protein, 18 aa, Artificial Sequence
  Synthetically generated peptide
  VARIANT (4)..(5): Xaa = Any Amino Acid
  misc_feature (12)..(12): Xaa can be any naturally occurring amino acid
  misc_feature (17)..(17): Xaa can be any naturally occurring amino acid
CCEXXYCCNPAXCTGCXY

SEQ ID NO: 709 - protein, 17 aa, Artificial Sequence
  Synthetically generated peptide
  VARIANT (4)..(5): Xaa = Any Amino Acid
  misc_feature (13)..(13): Xaa can be any naturally occurring amino acid
CCEXXYCCNPACXTGCY

SEQ ID NO: 710 - protein, 18 aa, Artificial Sequence
  Synthetically generated peptide
  VARIANT (4)..(5): Xaa = Any Amino Acid
  misc_feature (13)..(14): Xaa can be any naturally occurring amino acid
CCEXXYCCNPACXXTGCY

SEQ ID NO: 711 - protein, 18 aa, Artificial Sequence
  Synthetically generated peptide
  VARIANT (4)..(5): Xaa = Any Amino Acid
  misc_feature (13)..(13): Xaa can be any naturally occurring amino acid
  misc_feature (15)..(15): Xaa can be any naturally occurring amino acid
CCEXXYCCNPACXTXGCY

SEQ ID NO: 712 - protein, 18 aa, Artificial Sequence
  Synthetically generated peptide
  VARIANT (4)..(5): Xaa = Any Amino Acid
  misc_feature (13)..(13): Xaa can be any naturally occurring amino acid
  misc_feature (16)..(16): Xaa can be any naturally occurring amino acid
CCEXXYCCNPACXTGXCY

SEQ ID NO: 713 - protein, 18 aa, Artificial Sequence
  Synthetically generated peptide
  VARIANT (4)..(5): Xaa = Any Amino Acid
  misc_feature (13)..(13): Xaa can be any naturally occurring amino acid
  misc_feature (17)..(17): Xaa can be any naturally occurring amino acid
CCEXXYCCNPACXTGCXY

SEQ ID NO: 714 - protein, 17 aa, Artificial Sequence
  Synthetically generated peptide
  VARIANT (4)..(5): Xaa = Any Amino Acid
  misc_feature (14)..(14): Xaa can be any naturally occurring amino acid
CCEXXYCCNPACTXGCY

SEQ ID NO: 715 - protein, 18 aa, Artificial Sequence
  Synthetically generated peptide
  VARIANT (4)..(5): Xaa = Any Amino Acid
  misc_feature (14)..(15): Xaa can be any naturally occurring amino acid
CCEXXYCCNPACTXXGCY

SEQ ID NO: 716 - protein, 18 aa, Artificial Sequence
  Synthetically generated peptide
  VARIANT (4)..(5): Xaa = Any Amino Acid
  misc_feature (14)..(14): Xaa can be any naturally occurring amino acid
  misc_feature (16)..(16): Xaa can be any naturally occurring amino acid
CCEXXYCCNPACTXGXCY

SEQ ID NO: 717 - protein, 18 aa, Artificial Sequence
  Synthetically generated peptide
  VARIANT (4)..(5): Xaa = Any Amino Acid
  misc_feature (14)..(14): Xaa can be any naturally occurring amino acid
  misc_feature (17)..(17): Xaa can be any naturally occurring amino acid
CCEXXYCCNPACTXGCXY

SEQ ID NO: 718 - protein, 17 aa, Artificial Sequence
  Synthetically generated peptide
  VARIANT (4)..(5): Xaa = Any Amino Acid
  misc_feature (15)..(15): Xaa can be any naturally occurring amino acid
CCEXXYCCNPACTGXCY

SEQ ID NO: 719 - protein, 18 aa, Artificial Sequence
  Synthetically generated peptide
  VARIANT (4)..(5): Xaa = Any Amino Acid
  misc_feature (15)..(16): Xaa can be any naturally occurring amino acid
CCEXXYCCNPACTGXXCY

SEQ ID NO: 720 - protein, 18 aa, Artificial Sequence
  Synthetically generated peptide
  VARIANT (4)..(5): Xaa = Any Amino Acid
  misc_feature (15)..(15): Xaa can be any naturally occurring amino acid
  misc_feature (17)..(17): Xaa can be any naturally occurring amino acid
CCEXXYCCNPACTGXCXY

SEQ ID NO: 721 - protein, 17 aa, Artificial Sequence
  Synthetically generated peptide
  VARIANT (4)..(5): Xaa = Any Amino Acid
  misc_feature (16)..(16): Xaa can be any naturally occurring amino acid
CCEXXYCCNPACTGCXY

SEQ ID NO: 722 - protein, 18 aa, Artificial Sequence
  Synthetically generated peptide
  VARIANT (4)..(5): Xaa = Any Amino Acid
  misc_feature (16)..(17): Xaa can be any naturally occurring amino acid
CCEXXYCCNPACTGCXXY

SEQ ID NO: 723 - protein, 16 aa, Artificial Sequence
  Synthetically generated peptide
  VARIANT (4)..(6): Xaa = Any Amino Acid
CCEXYXCCNPACTGCY

SEQ ID NO: 724 - protein, 17 aa, Artificial Sequence
  Synthetically generated peptide
  VARIANT (4)..(6): Xaa = Any Amino Acid
  misc_feature (7)..(7): Xaa can be any naturally occurring amino acid
CCEXYXXCCNPACTGCY

SEQ ID NO: 725 - protein, 18 aa, Artificial Sequence
  Synthetically generated peptide
  VARIANT (4)..(6): Xaa = Any Amino Acid
  misc_feature (7)..(8): Xaa can be any naturally occurring amino acid
CCEXYXXXCCNPACTGCY

SEQ ID NO: 726 - protein, 18 aa, Artificial Sequence
  Synthetically generated peptide
  VARIANT (4)..(6): Xaa = Any Amino Acid
  misc_feature (7)..(7): Xaa can be any naturally occurring amino acid
  misc_feature (10)..(10): Xaa can be any naturally occurring amino acid
CCEXYXXCCXNPACTGCY

SEQ ID NO: 727 - protein, 18 aa, Artificial Sequence
  Synthetically generated peptide
  VARIANT (4)..(6): Xaa = Any Amino Acid
  misc_feature (7)..(7): Xaa can be any naturally occurring amino acid
  misc_feature (11)..(11): Xaa can be any naturally occurring amino acid
CCEXYXXCCNXPACTGCY

SEQ ID NO: 728 - protein, 18 aa, Artificial Sequence
  Synthetically generated peptide
  VARIANT (4)..(6): Xaa = Any Amino Acid
  misc_feature (7)..(7): Xaa can be any naturally occurring amino acid
  misc_feature (12)..(12): Xaa can be any naturally occurring amino acid
CCEXYXXCCNPXACTGCY

SEQ ID NO: 729 - protein, 18 aa, Artificial Sequence
  Synthetically generated peptide
  VARIANT (4)..(6): Xaa = Any Amino Acid
  misc_feature (7)..(7): Xaa can be any naturally occurring amino acid
  misc_feature (13)..(13): Xaa can be any naturally occurring amino acid
CCEXYXXCCNPAXCTGCY

SEQ ID NO: 730 - protein, 18 aa, Artificial Sequence
  Synthetically generated peptide
  VARIANT (4)..(6): Xaa = Any Amino Acid
  misc_feature (7)..(7): Xaa can be any naturally occurring amino acid
  misc_feature (14)..(14): Xaa can be any naturally occurring amino acid
CCEXYXXCCNPACXTGCY

SEQ ID NO: 731 - protein, 18 aa, Artificial Sequence
  Synthetically generated peptide
  VARIANT (4)..(6): Xaa = Any Amino Acid
  misc_feature (7)..(7): Xaa can be any naturally occurring amino acid
  misc_feature (15)..(15): Xaa can be any naturally occurring amino acid
CCEXYXXCCNPACTXGCY

SEQ ID NO: 732 - protein, 18 aa, Artificial Sequence
  Synthetically generated peptide
  VARIANT (4)..(6): Xaa = Any Amino Acid
  misc_feature (7)..(7): Xaa can be any naturally occurring amino acid
  misc_feature (16)..(16): Xaa can be any naturally occurring amino acid
CCEXYXXCCNPACTGXCY

SEQ ID NO: 733 - protein, 18 aa, Artificial Sequence
  Synthetically generated peptide
  VARIANT (4)..(6): Xaa = Any Amino Acid
  misc_feature (7)..(7): Xaa can be any naturally occurring amino acid
  misc_feature (17)..(17): Xaa can be any naturally occurring amino acid
CCEXYXXCCNPACTGCXY

SEQ ID NO: 734 - protein, 17 aa, Artificial Sequence
  Synthetically generated peptide
  VARIANT (4)..(6): Xaa = Any Amino Acid
  misc_feature (9)..(9): Xaa can be any naturally occurring amino acid
CCEXYXCCXNPACTGCY

SEQ ID NO: 735 - protein, 18 aa, Artificial Sequence
  Synthetically generated peptide
  VARIANT (4)..(6): Xaa = Any Amino Acid
  misc_feature (9)..(10): Xaa can be any naturally occurring amino acid
CCEXYXCCXXNPACTGCY

SEQ ID NO: 736 - protein, 18 aa, Artificial Sequence
  Synthetically generated peptide
  VARIANT (4)..(6): Xaa = Any Amino Acid
  misc_feature (9)..(9): Xaa can be any naturally occurring amino acid
  misc_feature (11)..(11): Xaa can be any naturally occurring amino acid
CCEXYXCCXNXPACTGCY

SEQ ID NO: 737 - protein, 18 aa, Artificial Sequence
  Synthetically generated peptide
  VARIANT (4)..(6): Xaa = Any Amino Acid
  misc_feature (9)..(9): Xaa can be any naturally occurring amino acid
  misc_feature (12)..(12): Xaa can be any naturally occurring amino acid
CCEXYXCCXNPXACTGCY

SEQ ID NO: 738 - protein, 18 aa, Artificial Sequence
  Synthetically generated peptide
  VARIANT (4)..(6): Xaa = Any Amino Acid
  misc_feature (9)..(9): Xaa can be any naturally occurring amino acid
  misc_feature (13)..(13): Xaa can be any naturally occurring amino acid
CCEXYXCCXNPAXCTGCY

SEQ ID NO: 739 - protein, 18 aa, Artificial Sequence
  Synthetically generated peptide
  VARIANT (4)..(6): Xaa = Any Amino Acid
  misc_feature (9)..(9): Xaa can be any naturally occurring amino acid
  misc_feature (14)..(14): Xaa can be any naturally occurring amino acid
CCEXYXCCXNPACXTGCY

SEQ ID NO: 740 - protein, 18 aa, Artificial Sequence
  Synthetically generated peptide
  VARIANT (4)..(6): Xaa = Any Amino Acid
  misc_feature (9)..(9): Xaa can be any naturally occurring amino acid
  misc_feature (15)..(15): Xaa can be any naturally occurring amino acid
CCEXYXCCXNPACTXGCY

SEQ ID NO: 741 - protein, 18 aa, Artificial Sequence
  Synthetically generated peptide
  VARIANT (4)..(6): Xaa = Any Amino Acid
  misc_feature (9)..(9): Xaa can be any naturally occurring amino acid
  misc_feature (16)..(16): Xaa can be any naturally occurring amino acid
CCEXYXCCXNPACTGXCY

SEQ ID NO: 742 - protein, 18 aa, Artificial Sequence
  Synthetically generated peptide
  VARIANT (4)..(6): Xaa = Any Amino Acid
  misc_feature (9)..(9): Xaa can be any naturally occurring amino acid
  misc_feature (17)..(17): Xaa can be any naturally occurring amino acid
CCEXYXCCXNPACTGCXY

SEQ ID NO: 743 - protein, 17 aa, Artificial Sequence
  Synthetically generated peptide
  VARIANT (4)..(6): Xaa = Any Amino Acid
  misc_feature (10)..(10): Xaa can be any naturally occurring amino acid
CCEXYXCCNXPACTGCY

SEQ ID NO: 744 - protein, 18 aa, Artificial Sequence
  Synthetically generated peptide
  VARIANT (4)..(6): Xaa = Any Amino Acid
  misc_feature (10)..(11): Xaa can be any naturally occurring amino acid
CCEXYXCCNXXPACTGCY

SEQ ID NO: 745 - protein, 18 aa, Artificial Sequence
  Synthetically generated peptide
  VARIANT (4)..(6): Xaa = Any Amino Acid
  misc_feature (10)..(10): Xaa can be any naturally occurring amino acid
  misc_feature (12)..(12): Xaa can be any naturally occurring amino acid
CCEXYXCCNXPXACTGCY

SEQ ID NO: 746 - protein, 18 aa, Artificial Sequence
  Synthetically generated peptide
  VARIANT (4)..(6): Xaa = Any Amino Acid
  misc_feature (10)..(10): Xaa can be any naturally occurring amino acid
  misc_feature (13)..(13): Xaa can be any naturally occurring amino acid
CCEXYXCCNXPAXCTGCY

SEQ ID NO: 747 - protein, 18 aa, Artificial Sequence
  Synthetically generated peptide
  VARIANT (4)..(6): Xaa = Any Amino Acid
  misc_feature (10)..(10): Xaa can be any naturally occurring amino acid
  misc_feature (14)..(14): Xaa can be any naturally occurring amino acid
CCEXYXCCNXPACXTGCY

SEQ ID NO: 748 - protein, 18 aa, Artificial Sequence
  Synthetically generated peptide
  VARIANT (4)..(6): Xaa = Any Amino Acid
  misc_feature (10)..(10): Xaa can be any naturally occurring amino acid
  misc_feature (15)..(15): Xaa can be any naturally occurring amino acid
CCEXYXCCNXPACTXGCY

SEQ ID NO: 749 - protein, 18 aa, Artificial Sequence
  Synthetically generated peptide
  VARIANT (4)..(6): Xaa = Any Amino Acid
  misc_feature (10)..(10): Xaa can be any naturally occurring amino acid
  misc_feature (16)..(16): Xaa can be any naturally occurring amino acid
CCEXYXCCNXPACTGXCY

SEQ ID NO: 750 - protein, 18 aa, Artificial Sequence
  Synthetically generated peptide
  VARIANT (4)..(6): Xaa = Any Amino Acid
  misc_feature (10)..(10): Xaa can be any naturally occurring amino acid
  misc_feature (17)..(17): Xaa can be any naturally occurring amino acid
CCEXYXCCNXPACTGCXY

SEQ ID NO: 751 - protein, 17 aa, Artificial Sequence
  Synthetically generated peptide
  VARIANT (4)..(6): Xaa = Any Amino Acid
  misc_feature (11)..(11): Xaa can be any naturally occurring amino acid
CCEXYXCCNPXACTGCY

SEQ ID NO: 752 - protein, 18 aa, Artificial Sequence
  Synthetically generated peptide
  VARIANT (4)..(6): Xaa = Any Amino Acid
  misc_feature (11)..(12): Xaa can be any naturally occurring amino acid
CCEXYXCCNPXXACTGCY

SEQ ID NO: 753 - protein, 18 aa, Artificial Sequence
  Synthetically generated peptide
  VARIANT (4)..(6): Xaa = Any Amino Acid
  misc_feature (11)..(11): Xaa can be any naturally occurring amino acid
  misc_feature (13)..(13): Xaa can be any naturally occurring amino acid
CCEXYXCCNPXAXCTGCY

SEQ ID NO: 754 - protein, 18 aa, Artificial Sequence
  Synthetically generated peptide
  VARIANT (4)..(6): Xaa = Any Amino Acid
  misc_feature (11)..(11): Xaa can be any naturally occurring amino acid
  misc_feature (14)..(14): Xaa can be any naturally occurring amino acid
CCEXYXCCNPXACXTGCY

SEQ ID NO: 755 - protein, 18 aa, Artificial Sequence
  Synthetically generated peptide
  VARIANT (4)..(6): Xaa = Any Amino Acid
  misc_feature (11)..(11): Xaa can be any naturally occurring amino acid
  misc_feature (15)..(15): Xaa can be any naturally occurring amino acid
CCEXYXCCNPXACTXGCY

SEQ ID NO: 756 - protein, 18 aa, Artificial Sequence
  Synthetically generated peptide
  VARIANT (4)..(6): Xaa = Any Amino Acid
  misc_feature (11)..(11): Xaa can be any naturally occurring amino acid
  misc_feature (16)..(16): Xaa can be any naturally occurring amino acid
CCEXYXCCNPXACTGXCY

SEQ ID NO: 757 - protein, 18 aa, Artificial Sequence
  Synthetically generated peptide
  VARIANT (4)..(6): Xaa = Any Amino Acid
  misc_feature (11)..(11): Xaa can be any naturally occurring amino acid
  misc_feature (17)..(17): Xaa can be any naturally occurring amino acid
CCEXYXCCNPXACTGCXY

SEQ ID NO: 758 - protein, 17 aa, Artificial Sequence
  Synthetically generated peptide
  VARIANT (4)..(6): Xaa = Any Amino Acid
  misc_feature (12)..(12): Xaa can be any naturally occurring amino acid
CCEXYXCCNPAXCTGCY

SEQ ID NO: 759 - protein, 18 aa, Artificial Sequence
  Synthetically generated peptide
  VARIANT (4)..(6): Xaa = Any Amino Acid
  misc_feature (12)..(13): Xaa can be any naturally occurring amino acid
CCEXYXCCNPAXXCTGCY

SEQ ID NO: 760 - protein, 18 aa, Artificial Sequence
  Synthetically generated peptide
  VARIANT (4)..(6): Xaa = Any Amino Acid
  misc_feature (12)..(12): Xaa can be any naturally occurring amino acid
  misc_feature (14)..(14): Xaa can be any naturally occurring amino acid
CCEXYXCCNPAXCXTGCY

SEQ ID NO: 761 - protein, 18 aa, Artificial Sequence
  Synthetically generated peptide
  VARIANT (4)..(6): Xaa = Any Amino Acid
  misc_feature (12)..(12): Xaa can be any naturally occurring amino acid
  misc_feature (15)..(15): Xaa can be any naturally occurring amino acid
CCEXYXCCNPAXCTXGCY

SEQ ID NO: 762 - protein, 18 aa, Artificial Sequence
  Synthetically generated peptide
  VARIANT (4)..(6): Xaa = Any Amino Acid
  misc_feature (12)..(12): Xaa can be any naturally occurring amino acid
  misc_feature (16)..(16): Xaa can be any naturally occurring amino acid
CCEXYXCCNPAXCTGXCY

SEQ ID NO: 763 - protein, 18 aa, Artificial Sequence
  Synthetically generated peptide
  VARIANT (4)..(6): Xaa = Any Amino Acid
  misc_feature (12)..(12): Xaa can be any naturally occurring amino acid
  misc_feature (17)..(17): Xaa can be any naturally occurring amino acid
CCEXYXCCNPAXCTGCXY

SEQ ID NO: 764 - protein, 17 aa, Artificial Sequence
  Synthetically generated peptide
  VARIANT (4)..(6): Xaa = Any Amino Acid
  misc_feature (13)..(13): Xaa can be any naturally occurring amino acid
CCEXYXCCNPACXTGCY

SEQ ID NO: 765 - protein, 18 aa, Artificial Sequence
  Synthetically generated peptide
  VARIANT (4)..(6): Xaa = Any Amino Acid
  misc_feature (13)..(14): Xaa can be any naturally occurring amino acid
CCEXYXCCNPACXXTGCY

SEQ ID NO: 766 - protein, 18 aa, Artificial Sequence
  Synthetically generated peptide
  VARIANT (4)..(6): Xaa = Any Amino Acid
  misc_feature (13)..(13): Xaa can be any naturally occurring amino acid
  misc_feature (15)..(15): Xaa can be any naturally occurring amino acid
CCEXYXCCNPACXTXGCY

SEQ ID NO: 767 - protein, 18 aa, Artificial Sequence
  Synthetically generated peptide
  VARIANT (4)..(6): Xaa = Any Amino Acid
  misc_feature (13)..(13): Xaa can be any naturally occurring amino acid
  misc_feature (16)..(16): Xaa can be any naturally occurring amino acid
CCEXYXCCNPACXTGXCY

SEQ ID NO: 768 - protein, 18 aa, Artificial Sequence
  Synthetically generated peptide
  VARIANT (4)..(6): Xaa = Any Amino Acid
  misc_feature (13)..(13): Xaa can be any naturally occurring amino acid
  misc_feature (17)..(17): Xaa can be any naturally occurring amino acid
CCEXYXCCNPACXTGCXY

SEQ ID NO: 769 - protein, 17 aa, Artificial Sequence
  Synthetically generated peptide
  VARIANT (4)..(6): Xaa = Any Amino Acid
  misc_feature (14)..(14): Xaa can be any naturally occurring amino acid
CCEXYXCCNPACTXGCY

SEQ ID NO: 770 - protein, 18 aa, Artificial Sequence
  Synthetically generated peptide
  VARIANT (4)..(6): Xaa = Any Amino Acid
  misc_feature (14)..(15): Xaa can be any naturally occurring amino acid
CCEXYXCCNPACTXXGCY

SEQ ID NO: 771 - protein, 18 aa, Artificial Sequence
  Synthetically generated peptide
  VARIANT (4)..(6): Xaa = Any Amino Acid
  misc_feature (14)..(14): Xaa can be any naturally occurring amino acid
  misc_feature (16)..(16): Xaa can be any naturally occurring amino acid
CCEXYXCCNPACTXGXCY

SEQ ID NO: 772 - protein, 18 aa, Artificial Sequence
  Synthetically generated peptide
  VARIANT (4)..(6): Xaa = Any Amino Acid
  misc_feature (14)..(14): Xaa can be any naturally occurring amino acid
  misc_feature (17)..(17): Xaa can be any naturally occurring amino acid
CCEXYXCCNPACTXGCXY

SEQ ID NO: 773 - protein, 17 aa, Artificial Sequence
  Synthetically generated peptide
  VARIANT (4)..(6): Xaa = Any Amino Acid
  misc_feature (15)..(15): Xaa can be any naturally occurring amino acid
CCEXYXCCNPACTGXCY

SEQ ID NO: 774 - protein, 18 aa, Artificial Sequence
  Synthetically generated peptide
  VARIANT (4)..(6): Xaa = Any Amino Acid
  misc_feature (15)..(16): Xaa can be any naturally occurring amino acid
CCEXYXCCNPACTGXXCY

SEQ ID NO: 775 - protein, 18 aa, Artificial Sequence
  Synthetically generated peptide
  VARIANT (4)..(6): Xaa = Any Amino Acid
  misc_feature (15)..(15): Xaa can be any naturally occurring amino acid
  misc_feature (17)..(17): Xaa can be any naturally occurring amino acid
CCEXYXCCNPACTGXCXY

SEQ ID NO: 776 - protein, 17 aa, Artificial Sequence
  Synthetically generated peptide
  VARIANT (4)..(6): Xaa = Any Amino Acid
  misc_feature (16)..(16): Xaa can be any naturally occurring amino acid
CCEXYXCCNPACTGCXY

SEQ ID NO: 777 - protein, 18 aa, Artificial Sequence
  Synthetically generated peptide
  VARIANT (4)..(6): Xaa = Any Amino Acid
  misc_feature (16)..(17): Xaa can be any naturally occurring amino acid
CCEXYXCCNPACTGCXXY

SEQ ID NO: 778 - protein, 16 aa, Artificial Sequence
  Synthetically generated peptide
  VARIANT (4)..(8): Xaa = Any Amino Acid
CCEXYCCXNPACTGCY

SEQ ID NO: 779 - protein, 17 aa, Artificial Sequence
  Synthetically generated peptide
  VARIANT (4)..(8): Xaa = Any Amino Acid
  misc_feature (9)..(9): Xaa can be any naturally occurring amino acid
CCEXYCCXXNPACTGCY

SEQ ID NO: 780 - protein, 18 aa, Artificial Sequence
  Synthetically generated peptide
  VARIANT (4)..(8): Xaa = Any Amino Acid
  misc_feature (9)..(10): Xaa can be any naturally occurring amino acid
CCEXYCCXXXNPACTGCY

SEQ ID NO: 781 - protein, 18 aa, Artificial Sequence
  Synthetically generated peptide
  VARIANT (4)..(8): Xaa = Any Amino Acid
  misc_feature (9)..(9): Xaa can be any naturally occurring amino acid
  misc_feature (11)..(11): Xaa can be any naturally occurring amino acid
CCEXYCCXXNXPACTGCY

SEQ ID NO: 782 - protein, 18 aa, Artificial Sequence
  Synthetically generated peptide
  VARIANT (4)..(8): Xaa = Any Amino Acid
  misc_feature (9)..(9): Xaa can be any naturally occurring amino acid
  misc_feature (12)..(12): Xaa can be any naturally occurring amino acid
CCEXYCCXXNPXACTGCY

SEQ ID NO: 783 - protein, 18 aa, Artificial Sequence
  Synthetically generated peptide
  VARIANT (4)..(8): Xaa = Any Amino Acid
  misc_feature (9)..(9): Xaa can be any naturally occurring amino acid
  misc_feature (13)..(13): Xaa can be any naturally occurring amino acid
CCEXYCCXXNPAXCTGCY

SEQ ID NO: 784 - protein, 18 aa, Artificial Sequence
  Synthetically generated peptide
  VARIANT (4)..(8): Xaa = Any Amino Acid
  misc_feature (9)..(9): Xaa can be any naturally occurring amino acid
  misc_feature (14)..(14): Xaa can be any naturally occurring amino acid
CCEXYCCXXNPACXTGCY

SEQ ID NO: 785 - protein, 18 aa, Artificial Sequence
  Synthetically generated peptide
  VARIANT (4)..(8): Xaa = Any Amino Acid
  misc_feature (9)..(9): Xaa can be any naturally occurring amino acid
  misc_feature (15)..(15): Xaa can be any naturally occurring amino acid
CCEXYCCXXNPACTXGCY

SEQ ID NO: 786 - protein, 18 aa, Artificial Sequence
  Synthetically generated peptide
  VARIANT (4)..(8): Xaa = Any Amino Acid
  misc_feature (9)..(9): Xaa can be any naturally occurring amino acid
  misc_feature (16)..(16): Xaa can be any naturally occurring amino acid
CCEXYCCXXNPACTGXCY

SEQ ID NO: 787 - protein, 18 aa, Artificial Sequence
  Synthetically generated peptide
  VARIANT (4)..(8): Xaa = Any Amino Acid
  misc_feature (9)..(9): Xaa can be any naturally occurring amino acid
  misc_feature (17)..(17): Xaa can be any naturally occurring amino acid
CCEXYCCXXNPACTGCXY

SEQ ID NO: 788 - protein, 17 aa, Artificial Sequence
  Synthetically generated peptide
  VARIANT (4)..(8): Xaa = Any Amino Acid
  misc_feature (10)..(10): Xaa can be any naturally occurring amino acid
CCEXYCCXNXPACTGCY

SEQ ID NO: 789 - protein, 18 aa, Artificial Sequence
  Synthetically generated peptide
  VARIANT (4)..(8): Xaa = Any Amino Acid
  misc_feature (10)..(11): Xaa can be any naturally occurring amino acid
CCEXYCCXNXXPACTGCY

SEQ ID NO: 790 - protein, 18 aa, Artificial Sequence
  Synthetically generated peptide
  VARIANT (4)..(8): Xaa = Any Amino Acid
  misc_feature (10)..(10): Xaa can be any naturally occurring amino acid
  misc_feature (12)..(12): Xaa can be any naturally occurring amino acid
CCEXYCCXNXPXACTGCY

SEQ ID NO: 791 - protein, 18 aa, Artificial Sequence
  Synthetically generated peptide
  VARIANT (4)..(8): Xaa = Any Amino Acid
  misc_feature (10)..(10): Xaa can be any naturally occurring amino acid
  misc_feature (13)..(13): Xaa can be any naturally occurring amino acid
CCEXYCCXNXPAXCTGCY

SEQ ID NO: 792 - protein, 18 aa, Artificial Sequence
  Synthetically generated peptide
  VARIANT (4)..(8): Xaa = Any Amino Acid
  misc_feature (10)..(10): Xaa can be any naturally occurring amino acid
  misc_feature (14)..(14): Xaa can be any naturally occurring amino acid
CCEXYCCXNXPACXTGCY

SEQ ID NO: 793 - protein, 18 aa, Artificial Sequence
  Synthetically generated peptide
  VARIANT (4)..(8): Xaa = Any Amino Acid
  misc_feature (10)..(10): Xaa can be any naturally occurring amino acid
  misc_feature (15)..(15): Xaa can be any naturally occurring amino acid
CCEXYCCXNXPACTXGCY

SEQ ID NO: 794 - protein, 18 aa, Artificial Sequence
  Synthetically generated peptide
  VARIANT (4)..(8): Xaa = Any Amino Acid
  misc_feature (10)..(10): Xaa can be any naturally occurring amino acid
  misc_feature (16)..(16): Xaa can be any naturally occurring amino acid
CCEXYCCXNXPACTGXCY

SEQ ID NO: 795 - protein, 18 aa, Artificial Sequence
  Synthetically generated peptide
  VARIANT (4)..(8): Xaa = Any Amino Acid
  misc_feature (10)..(10): Xaa can be any naturally occurring amino acid
  misc_feature (17)..(17): Xaa can be any naturally occurring amino acid
CCEXYCCXNXPACTGCXY

SEQ ID NO: 796 - protein, 17 aa, Artificial Sequence
  Synthetically generated peptide
  VARIANT (4)..(8): Xaa = Any Amino Acid
  misc_feature (11)..(11): Xaa can be any naturally occurring amino acid
CCEXYCCXNPXACTGCY

SEQ ID NO: 797 - protein, 18 aa, Artificial Sequence
  Synthetically generated peptide
  VARIANT (4)..(8): Xaa = Any Amino Acid
  misc_feature (11)..(12): Xaa can be any naturally occurring amino acid
CCEXYCCXNPXXACTGCY

SEQ ID NO: 798 - protein, 18 aa, Artificial Sequence
  Synthetically generated peptide
  VARIANT (4)..(8): Xaa = Any Amino Acid
  misc_feature (11)..(11): Xaa can be any naturally occurring amino acid
  misc_feature (13)..(13): Xaa can be any naturally occurring amino acid
CCEXYCCXNPXAXCTGCY

SEQ ID NO: 799 - protein, 18 aa, Artificial Sequence
  Synthetically generated peptide
  VARIANT (4)..(8): Xaa = Any Amino Acid
  misc_feature (11)..(11): Xaa can be any naturally occurring amino acid
  misc_feature (14)..(14): Xaa can be any naturally occurring amino acid
CCEXYCCXNPXACXTGCY

SEQ ID NO: 800 - protein, 18 aa, Artificial Sequence
  Synthetically generated peptide
  VARIANT (4)..(8): Xaa = Any Amino Acid
  misc_feature (11)..(11): Xaa can be any naturally occurring amino acid
  misc_feature (15)..(15): Xaa can be any naturally occurring amino acid
CCEXYCCXNPXACTXGCY

SEQ ID NO: 801 - protein, 18 aa, Artificial Sequence
  Synthetically generated peptide
  VARIANT (4)..(8): Xaa = Any Amino Acid
  misc_feature (11)..(11): Xaa can be any naturally occurring amino acid
  misc_feature (16)..(16): Xaa can be any naturally occurring amino acid
CCEXYCCXNPXACTGXCY

SEQ ID NO: 802 - protein, 18 aa, Artificial Sequence
  Synthetically generated peptide
  VARIANT (4)..(8): Xaa = Any Amino Acid
  misc_feature (11)..(11): Xaa can be any naturally occurring amino acid
  misc_feature (17)..(17): Xaa can be any naturally occurring amino acid
CCEXYCCXNPXACTGCXY

SEQ ID NO: 803 - protein, 17 aa, Artificial Sequence
  Synthetically generated peptide
  VARIANT (4)..(8): Xaa = Any Amino Acid
  misc_feature (12)..(12): Xaa can be any naturally occurring amino acid
CCEXYCCXNPAXCTGCY

SEQ ID NO: 804 - protein, 18 aa, Artificial Sequence
  Synthetically generated peptide
  VARIANT (4)..(8): Xaa = Any Amino Acid
  misc_feature (12)..(13): Xaa can be any naturally occurring amino acid
CCEXYCCXNPAXXCTGCY

SEQ ID NO: 805 - protein, 18 aa, Artificial Sequence
  Synthetically generated peptide
  VARIANT (4)..(8): Xaa = Any Amino Acid
  misc_feature (12)..(12): Xaa can be any naturally occurring amino acid
  misc_feature (14)..(14): Xaa can be any naturally occurring amino acid
CCEXYCCXNPAXCXTGCY

SEQ ID NO: 806 - protein, 18 aa, Artificial Sequence
  Synthetically generated peptide
  VARIANT (4)..(8): Xaa = Any Amino Acid
  misc_feature (12)..(12): Xaa can be any naturally occurring amino acid
  misc_feature (15)..(15): Xaa can be any naturally occurring amino acid
CCEXYCCXNPAXCTXGCY

SEQ ID NO: 807 - protein, 18 aa, Artificial Sequence
  Synthetically generated peptide
  VARIANT (4)..(8): Xaa = Any Amino Acid
  misc_feature (12)..(12): Xaa can be any naturally occurring amino acid
  misc_feature (16)..(16): Xaa can be any naturally occurring amino acid
CCEXYCCXNPAXCTGXCY

SEQ ID NO: 808 - protein, 18 aa, Artificial Sequence
  Synthetically generated peptide
  VARIANT (4)..(8): Xaa = Any Amino Acid
  misc_feature (12)..(12): Xaa can be any naturally occurring amino acid
  misc_feature (17)..(17): Xaa can be any naturally occurring amino acid
CCEXYCCXNPAXCTGCXY

SEQ ID NO: 809 - protein, 17 aa, Artificial Sequence
  Synthetically generated peptide
  VARIANT (4)..(8): Xaa = Any Amino Acid
  misc_feature (13)..(13): Xaa can be any naturally occurring amino acid
CCEXYCCXNPACXTGCY

SEQ ID NO: 810 - protein, 18 aa, Artificial Sequence
  Synthetically generated peptide
  VARIANT (4)..(8): Xaa = Any Amino Acid
  misc_feature (13)..(14): Xaa can be any naturally occurring amino acid
CCEXYCCXNPACXXTGCY

SEQ ID NO: 811 - protein, 18 aa, Artificial Sequence
  Synthetically generated peptide
  VARIANT (4)..(8): Xaa = Any Amino Acid
  misc_feature (13)..(13): Xaa can be any naturally occurring amino acid
  misc_feature (15)..(15): Xaa can be any naturally occurring amino acid
CCEXYCCXNPACXTXGCY

SEQ ID NO: 812 - protein, 18 aa, Artificial Sequence
  Synthetically generated peptide
  VARIANT (4)..(8): Xaa = Any Amino Acid
  misc_feature (13)..(13): Xaa can be any naturally occurring amino acid
  misc_feature (16)..(16): Xaa can be any naturally occurring amino acid
CCEXYCCXNPACXTGXCY

SEQ ID NO: 813 - protein, 18 aa, Artificial Sequence
  Synthetically generated peptide
  VARIANT (4)..(8): Xaa = Any Amino Acid
  misc_feature (13)..(13): Xaa can be any naturally occurring amino acid
  misc_feature (17)..(17): Xaa can be any naturally occurring amino acid
CCEXYCCXNPACXTGCXY

SEQ ID NO: 814 - protein, 17 aa, Artificial Sequence
  Synthetically generated peptide
  VARIANT (4)..(8): Xaa = Any Amino Acid
  misc_feature (14)..(14): Xaa can be any naturally occurring amino acid
CCEXYCCXNPACTXGCY

SEQ ID NO: 815 - protein, 18 aa, Artificial Sequence
  Synthetically generated peptide
  VARIANT (4)..(8): Xaa = Any Amino Acid
  misc_feature (14)..(15): Xaa can be any naturally occurring amino acid
CCEXYCCXNPACTXXGCY

SEQ ID NO: 816 - protein, 18 aa, Artificial Sequence
  Synthetically generated peptide
  VARIANT (4)..(8): Xaa = Any Amino Acid
  misc_feature (14)..(14): Xaa can be any naturally occurring amino acid
  misc_feature (16)..(16): Xaa can be any naturally occurring amino acid
CCEXYCCXNPACTXGXCY

SEQ ID NO: 817 - protein, 18 aa, Artificial Sequence
  Synthetically generated peptide
  VARIANT (4)..(8): Xaa = Any Amino Acid
  misc_feature (14)..(14): Xaa can be any naturally occurring amino acid
  misc_feature (17)..(17): Xaa can be any naturally occurring amino acid
CCEXYCCXNPACTXGCXY

SEQ ID NO: 818 - protein, 17 aa, Artificial Sequence
  Synthetically generated peptide
  VARIANT (4)..(8): Xaa = Any Amino Acid
  misc_feature (15)..(15): Xaa can be any naturally occurring amino acid
CCEXYCCXNPACTGXCY

SEQ ID NO: 819 - protein, 18 aa, Artificial Sequence
  Synthetically generated peptide
  VARIANT (4)..(8): Xaa = Any Amino Acid
  misc_feature (15)..(16): Xaa can be any naturally occurring amino acid
CCEXYCCXNPACTGXXCY

SEQ ID NO: 820 - protein, 18 aa, Artificial Sequence
  Synthetically generated peptide
  VARIANT (4)..(8): Xaa = Any Amino Acid
  misc_feature (15)..(15): Xaa can be any naturally occurring amino acid
  misc_feature (17)..(17): Xaa can be any naturally occurring amino acid
CCEXYCCXNPACTGXCXY

SEQ ID NO: 821 - protein, 17 aa, Artificial Sequence
  Synthetically generated peptide
  VARIANT (4)..(8): Xaa = Any Amino Acid
  misc_feature (16)..(16): Xaa can be any naturally occurring amino acid
CCEXYCCXNPACTGCXY

SEQ ID NO: 822 - protein, 18 aa, Artificial Sequence
  Synthetically generated peptide
  VARIANT (4)..(8): Xaa = Any Amino Acid
  misc_feature (16)..(17): Xaa can be any naturally occurring amino acid
CCEXYCCXNPACTGCXXY

SEQ ID NO: 823 - protein, 16 aa, Artificial Sequence
  Synthetically generated peptide
  VARIANT (4)..(9): Xaa = Any Amino Acid
CCEXYCCNXPACTGCY

SEQ ID NO: 824 - protein, 17 aa, Artificial Sequence
  Synthetically generated peptide
  VARIANT (4)..(9): Xaa = Any Amino Acid
  misc_feature (10)..(10): Xaa can be any naturally occurring amino acid
CCEXYCCNXXPACTGCY

SEQ ID NO: 825 - protein, 18 aa, Artificial Sequence
  Synthetically generated peptide
  VARIANT (4)..(9): Xaa = Any Amino Acid
  misc_feature (10)..(11): Xaa can be any naturally occurring amino acid
CCEXYCCNXXXPACTGCY

SEQ ID NO: 826 - protein, 18 aa, Artificial Sequence
  Synthetically generated peptide
  VARIANT (4)..(9): Xaa = Any Amino Acid
  misc_feature (10)..(10): Xaa can be any naturally occurring amino acid
  misc_feature (12)..(12): Xaa can be any naturally occurring amino acid
CCEXYCCNXXPXACTGCY

SEQ ID NO: 827 - protein, 18 aa, Artificial Sequence
  Synthetically generated peptide
  VARIANT (4)..(9): Xaa = Any Amino Acid
  misc_feature (10)..(10): Xaa can be any naturally occurring amino acid
  misc_feature (13)..(13): Xaa can be any naturally occurring amino acid
CCEXYCCNXXPAXCTGCY

SEQ ID NO: 828 - protein, 18 aa, Artificial Sequence
  Synthetically generated peptide
  VARIANT (4)..(9): Xaa = Any Amino Acid
  misc_feature (10)..(10): Xaa can be any naturally occurring amino acid
  misc_feature (14)..(14): Xaa can be any naturally occurring amino acid
CCEXYCCNXXPACXTGCY

SEQ ID NO: 829 - protein, 18 aa, Artificial Sequence
  Synthetically generated peptide
  VARIANT (4)..(9): Xaa = Any Amino Acid
  misc_feature (10)..(10): Xaa can be any naturally occurring amino acid
  misc_feature (15)..(15): Xaa can be any naturally occurring amino acid
CCEXYCCNXXPACTXGCY

SEQ ID NO: 830 - protein, 18 aa, Artificial Sequence
  Synthetically generated peptide
  VARIANT (4)..(9): Xaa = Any Amino Acid
  misc_feature (10)..(10): Xaa can be any naturally occurring amino acid
  misc_feature (16)..(16): Xaa can be any naturally occurring amino acid
CCEXYCCNXXPACTGXCY

SEQ ID NO: 831 - protein, 18 aa, Artificial Sequence
  Synthetically generated peptide
  VARIANT (4)..(9): Xaa = Any Amino Acid
  misc_feature (10)..(10): Xaa can be any naturally occurring amino acid
  misc_feature (17)..(17): Xaa can be any naturally occurring amino acid
CCEXYCCNXXPACTGCXY

SEQ ID NO: 832 - protein, 17 aa, Artificial Sequence
  Synthetically generated peptide
  VARIANT (4)..(9): Xaa = Any Amino Acid
  misc_feature (11)..(11): Xaa can be any naturally occurring amino acid
CCEXYCCNXPXACTGCY

SEQ ID NO: 833 - protein, 18 aa, Artificial Sequence
  Synthetically generated peptide
  VARIANT (4)..(9): Xaa = Any Amino Acid
  misc_feature (11)..(12): Xaa can be any naturally occurring amino acid
CCEXYCCNXPXXACTGCY

SEQ ID NO: 834 - protein, 18 aa, Artificial Sequence
  Synthetically generated peptide
  VARIANT (4)..(9): Xaa = Any Amino Acid
  misc_feature (11)..(11): Xaa can be any naturally occurring amino acid
  misc_feature (13)..(13): Xaa can be any naturally occurring amino acid
CCEXYCCNXPXAXCTGCY

SEQ ID NO: 835 - protein, 18 aa, Artificial Sequence
  Synthetically generated peptide
  VARIANT (4)..(9): Xaa = Any Amino Acid
  misc_feature (11)..(11): Xaa can be any naturally occurring amino acid
  misc_feature (14)..(14): Xaa can be any naturally occurring amino acid
CCEXYCCNXPXACXTGCY

SEQ ID NO: 836 - protein, 18 aa, Artificial Sequence
  Synthetically generated peptide
  VARIANT (4)..(9): Xaa = Any Amino Acid
  misc_feature (11)..(11): Xaa can be any naturally occurring amino acid
  misc_feature (15)..(15): Xaa can be any naturally occurring amino acid
CCEXYCCNXPXACTXGCY

SEQ ID NO: 837 - protein, 18 aa, Artificial Sequence
  Synthetically generated peptide
  VARIANT (4)..(9): Xaa = Any Amino Acid
  misc_feature (11)..(11): Xaa can be any naturally occurring amino acid
  misc_feature (16)..(16): Xaa can be any naturally occurring amino acid
CCEXYCCNXPXACTGXCY

SEQ ID NO: 838 - protein, 18 aa, Artificial Sequence
  Synthetically generated peptide
  VARIANT (4)..(9): Xaa = Any Amino Acid
  misc_feature (11)..(11): Xaa can be any naturally occurring amino acid
  misc_feature (17)..(17): Xaa can be any naturally occurring amino acid
CCEXYCCNXPXACTGCXY

SEQ ID NO: 839 - protein, 17 aa, Artificial Sequence
  Synthetically generated peptide
  VARIANT (4)..(9): Xaa = Any Amino Acid
  misc_feature (12)..(12): Xaa can be any naturally occurring amino acid
CCEXYCCNXPAXCTGCY

SEQ ID NO: 840 - protein, 18 aa, Artificial Sequence
  Synthetically generated peptide
  VARIANT (4)..(9): Xaa = Any Amino Acid
  misc_feature (12)..(13): Xaa can be any naturally occurring amino acid
CCEXYCCNXPAXXCTGCY

SEQ ID NO: 841 - protein, 18 aa, Artificial Sequence
  Synthetically generated peptide
  VARIANT (4)..(9): Xaa = Any Amino Acid
  misc_feature (12)..(12): Xaa can be any naturally occurring amino acid
  misc_feature (14)..(14): Xaa can be any naturally occurring amino acid
CCEXYCCNXPAXCXTGCY

SEQ ID NO: 842 - protein, 18 aa, Artificial Sequence
  Synthetically generated peptide
  VARIANT (4)..(9): Xaa = Any Amino Acid
  misc_feature (12)..(12): Xaa can be any naturally occurring amino acid
  misc_feature (15)..(15): Xaa can be any naturally occurring amino acid
CCEXYCCNXPAXCTXGCY

SEQ ID NO: 843 - protein, 18 aa, Artificial Sequence
  Synthetically generated peptide
  VARIANT (4)..(9): Xaa = Any Amino Acid
  misc_feature (12)..(12): Xaa can be any naturally occurring amino acid
  misc_feature (16)..(16): Xaa can be any naturally occurring amino acid
CCEXYCCNXPAXCTGXCY

SEQ ID NO: 844 - protein, 18 aa, Artificial Sequence
  Synthetically generated peptide
  VARIANT (4)..(9): Xaa = Any Amino Acid
  misc_feature (12)..(12): Xaa can be any naturally occurring amino acid
  misc_feature (17)..(17): Xaa can be any naturally occurring amino acid
CCEXYCCNXPAXCTGCXY

SEQ ID NO: 845 - protein, 17 aa, Artificial Sequence
  Synthetically generated peptide
  VARIANT (4)..(9): Xaa = Any Amino Acid
  misc_feature (13)..(13): Xaa can be any naturally occurring amino acid
CCEXYCCNXPACXTGCY

SEQ ID NO: 846 - protein, 18 aa, Artificial Sequence
  Synthetically generated peptide
  VARIANT (4)..(9): Xaa = Any Amino Acid
  misc_feature (13)..(14): Xaa can be any naturally occurring amino acid
CCEXYCCNXPACXXTGCY

SEQ ID NO: 847 - protein, 18 aa, Artificial Sequence
  Synthetically generated peptide
  VARIANT (4)..(9): Xaa = Any Amino Acid
  misc_feature (13)..(13): Xaa can be any naturally occurring amino acid
  misc_feature (15)..(15): Xaa can be any naturally occurring amino acid
CCEXYCCNXPACXTXGCY

SEQ ID NO: 848 - protein, 18 aa, Artificial Sequence
  Synthetically generated peptide
  VARIANT (4)..(9): Xaa = Any Amino Acid
  misc_feature (13)..(13): Xaa can be any naturally occurring amino acid
  misc_feature (16)..(16): Xaa can be any naturally occurring amino acid
CCEXYCCNXPACXTGXCY

SEQ ID NO: 849 - protein, 18 aa, Artificial Sequence
  Synthetically generated peptide
  VARIANT (4)..(9): Xaa = Any Amino Acid
  misc_feature (13)..(13): Xaa can be any naturally occurring amino acid
  misc_feature (17)..(17): Xaa can be any naturally occurring amino acid
CCEXYCCNXPACXTGCXY

SEQ ID NO: 850 - protein, 17 aa, Artificial Sequence
  Synthetically generated peptide
  VARIANT (4)..(9): Xaa = Any Amino Acid
  misc_feature (14)..(14): Xaa can be any naturally occurring amino acid
CCEXYCCNXPACTXGCY

SEQ ID NO: 851 - protein, 18 aa, Artificial Sequence
  Synthetically generated peptide
  VARIANT (4)..(9): Xaa = Any Amino Acid
  misc_feature (14)..(15): Xaa can be any naturally occurring amino acid
CCEXYCCNXPACTXXGCY

SEQ ID NO: 852 - protein, 18 aa, Artificial Sequence
  Synthetically generated peptide
  VARIANT (4)..(9): Xaa = Any Amino Acid
  misc_feature (14)..(14): Xaa can be any naturally occurring amino acid
  misc_feature (16)..(16): Xaa can be any naturally occurring amino acid
CCEXYCCNXPACTXGXCY

SEQ ID NO: 853 - protein, 18 aa, Artificial Sequence
  Synthetically generated peptide
  VARIANT (4)..(9): Xaa = Any Amino Acid
  misc_feature (14)..(14): Xaa can be any naturally occurring amino acid
  misc_feature (17)..(17): Xaa can be any naturally occurring amino acid
CCEXYCCNXPACTXGCXY

SEQ ID NO: 854 - protein, 17 aa, Artificial Sequence
  Synthetically generated peptide
  VARIANT (4)..(9): Xaa = Any Amino Acid
  misc_feature (15)..(15): Xaa can be any naturally occurring amino acid
CCEXYCCNXPACTGXCY

SEQ ID NO: 855 - protein, 18 aa, Artificial Sequence
  Synthetically generated peptide
  VARIANT (4)..(9): Xaa = Any Amino Acid
  misc_feature (15)..(16): Xaa can be any naturally occurring amino acid
CCEXYCCNXPACTGXXCY

SEQ ID NO: 856 - protein, 18 aa, Artificial Sequence
  Synthetically generated peptide
  VARIANT (4)..(9): Xaa = Any Amino Acid
  misc_feature (15)..(15): Xaa can be any naturally occurring amino acid
  misc_feature (17)..(17): Xaa can be any naturally occurring amino acid
CCEXYCCNXPACTGXCXY

SEQ ID NO: 857 - protein, 17 aa, Artificial Sequence
  Synthetically generated peptide
  VARIANT (4)..(9): Xaa = Any Amino Acid
  misc_feature (16)..(16): Xaa can be any naturally occurring amino acid
CCEXYCCNXPACTGCXY

SEQ ID NO: 858 - protein, 18 aa, Artificial Sequence
  Synthetically generated peptide
  VARIANT (4)..(9): Xaa = Any Amino Acid
  misc_feature (16)..(17): Xaa can be any naturally occurring amino acid
CCEXYCCNXPACTGCXXY

SEQ ID NO: 859 - protein, 16 aa, Artificial Sequence
  Synthetically generated peptide
  VARIANT (4)..(10): Xaa = Any Amino Acid
CCEXYCCNPXACTGCY

SEQ ID NO: 860 - protein, 17 aa, Artificial Sequence
  Synthetically generated peptide
  VARIANT (4)..(10): Xaa = Any Amino Acid
  misc_feature (11)..(11): Xaa can be any naturally occurring amino acid
CCEXYCCNPXXACTGCY

SEQ ID NO: 861 - protein, 18 aa, Artificial Sequence
  Synthetically generated peptide
  VARIANT (4)..(10): Xaa = Any Amino Acid
  misc_feature (11)..(12): Xaa can be any naturally occurring amino acid
CCEXYCCNPXXXACTGCY

SEQ ID NO: 862 - protein, 18 aa, Artificial Sequence
  Synthetically generated peptide
  VARIANT (4)..(10): Xaa = Any Amino Acid
  misc_feature (11)..(11): Xaa can be any naturally occurring amino acid
  misc_feature (13)..(13): Xaa can be any naturally occurring amino acid
CCEXYCCNPXXAXCTGCY

SEQ ID NO: 863 - protein, 18 aa, Artificial Sequence
  Synthetically generated peptide
  VARIANT (4)..(10): Xaa = Any Amino Acid
  misc_feature (11)..(11): Xaa can be any naturally occurring amino acid
  misc_feature (14)..(14): Xaa can be any naturally occurring amino acid
CCEXYCCNPXXACXTGCY

SEQ ID NO: 864 - protein, 18 aa, Artificial Sequence
  Synthetically generated peptide
  VARIANT (4)..(10): Xaa = Any Amino Acid
  misc_feature (11)..(11): Xaa can be any naturally occurring amino acid
  misc_feature (15)..(15): Xaa can be any naturally occurring amino acid
CCEXYCCNPXXACTXGCY

SEQ ID NO: 865 - protein, 18 aa, Artificial Sequence
  Synthetically generated peptide
  VARIANT (4)..(10): Xaa = Any Amino Acid
  misc_feature (11)..(11): Xaa can be any naturally occurring amino acid
  misc_feature (16)..(16): Xaa can be any naturally occurring amino acid
CCEXYCCNPXXACTGXCY

SEQ ID NO: 866 - protein, 18 aa, Artificial Sequence
  Synthetically generated peptide
  VARIANT (4)..(10): Xaa = Any Amino Acid
  misc_feature (11)..(11): Xaa can be any naturally occurring amino acid
  misc_feature (17)..(17): Xaa can be any naturally occurring amino acid
CCEXYCCNPXXACTGCXY

SEQ ID NO: 867 - protein, 17 aa, Artificial Sequence
  Synthetically generated peptide
  VARIANT (4)..(10): Xaa = Any Amino Acid
  misc_feature (12)..(12): Xaa can be any naturally occurring amino acid
CCEXYCCNPXAXCTGCY

SEQ ID NO: 868 - protein, 18 aa, Artificial Sequence
  Synthetically generated peptide
  VARIANT (4)..(10): Xaa = Any Amino Acid
  misc_feature (12)..(13): Xaa can be any naturally occurring amino acid
CCEXYCCNPXAXXCTGCY

SEQ ID NO: 869 - protein, 18 aa, Artificial Sequence
  Synthetically generated peptide
  VARIANT (4)..(10): Xaa = Any Amino Acid
  misc_feature (12)..(12): Xaa can be any naturally occurring amino acid
  misc_feature (14)..(14): Xaa can be any naturally occurring amino acid
CCEXYCCNPXAXCXTGCY

SEQ ID NO: 870 - protein, 18 aa, Artificial Sequence
  Synthetically generated peptide
  VARIANT (4)..(10): Xaa = Any Amino Acid
  misc_feature (12)..(12): Xaa can be any naturally occurring amino acid
  misc_feature (15)..(15): Xaa can be any naturally occurring amino acid
CCEXYCCNPXAXCTXGCY

SEQ ID NO: 871 - protein, 18 aa, Artificial Sequence
  Synthetically generated peptide
  VARIANT (4)..(10): Xaa = Any Amino Acid
  misc_feature (12)..(12): Xaa can be any naturally occurring amino acid
  misc_feature (16)..(16): Xaa can be any naturally occurring amino acid
CCEXYCCNPXAXCTGXCY

SEQ ID NO: 872 - protein, 18 aa, Artificial Sequence
  Synthetically generated peptide
  VARIANT (4)..(10): Xaa = Any Amino Acid
  misc_feature (12)..(12): Xaa can be any naturally occurring amino acid
  misc_feature (17)..(17): Xaa can be any naturally occurring amino acid
CCEXYCCNPXAXCTGCXY

SEQ ID NO: 873 - protein, 17 aa, Artificial Sequence
  Synthetically generated peptide
  VARIANT (4)..(10): Xaa = Any Amino Acid
  misc_feature (13)..(13): Xaa can be any naturally occurring amino acid
CCEXYCCNPXACXTGCY

SEQ ID NO: 874 - protein, 18 aa, Artificial Sequence
  Synthetically generated peptide
  VARIANT (4)..(10): Xaa = Any Amino Acid
  misc_feature (13)..(14): Xaa can be any naturally occurring amino acid
CCEXYCCNPXACXXTGCY

SEQ ID NO: 875 - protein, 18 aa, Artificial Sequence
  Synthetically generated peptide
  VARIANT (4)..(10): Xaa = Any Amino Acid
  misc_feature (13)..(13): Xaa can be any naturally occurring amino acid
  misc_feature (15)..(15): Xaa can be any naturally occurring amino acid
CCEXYCCNPXACXTXGCY

SEQ ID NO: 876 - protein, 18 aa, Artificial Sequence
  Synthetically generated peptide
  VARIANT (4)..(10): Xaa = Any Amino Acid
  misc_feature (13)..(13): Xaa can be any naturally occurring amino acid
  misc_feature (16)..(16): Xaa can be any naturally occurring amino acid
CCEXYCCNPXACXTGXCY

SEQ ID NO: 877 - protein, 18 aa, Artificial Sequence
  Synthetically generated peptide
  VARIANT (4)..(10): Xaa = Any Amino Acid
  misc_feature (13)..(13): Xaa can be any naturally occurring amino acid
  misc_feature (17)..(17): Xaa can be any naturally occurring amino acid
CCEXYCCNPXACXTGCXY

SEQ ID NO: 878 - protein, 17 aa, Artificial Sequence
  Synthetically generated peptide
  VARIANT (4)..(10): Xaa = Any Amino Acid
  misc_feature (14)..(14): Xaa can be any naturally occurring amino acid
CCEXYCCNPXACTXGCY

SEQ ID NO: 879 - protein, 18 aa, Artificial Sequence
  Synthetically generated peptide
  VARIANT (4)..(10): Xaa = Any Amino Acid
  misc_feature (14)..(15): Xaa can be any naturally occurring amino acid
CCEXYCCNPXACTXXGCY

SEQ ID NO: 880 - protein, 18 aa, Artificial Sequence
  Synthetically generated peptide
  VARIANT (4)..(10): Xaa = Any Amino Acid
  misc_feature (14)..(14): Xaa can be any naturally occurring amino acid
  misc_feature (16)..(16): Xaa can be any naturally occurring amino acid
CCEXYCCNPXACTXGXCY

SEQ ID NO: 881 - protein, 18 aa, Artificial Sequence
  Synthetically generated peptide
  VARIANT (4)..(10): Xaa = Any Amino Acid
  misc_feature (14)..(14): Xaa can be any naturally occurring amino acid
  misc_feature (17)..(17): Xaa can be any naturally occurring amino acid
CCEXYCCNPXACTXGCXY

SEQ ID NO: 882 - protein, 17 aa, Artificial Sequence
  Synthetically generated peptide
  VARIANT (4)..(10): Xaa = Any Amino Acid
  misc_feature (15)..(15): Xaa can be any naturally occurring amino acid
CCEXYCCNPXACTGXCY

SEQ ID NO: 883 - protein, 18 aa, Artificial Sequence
  Synthetically generated peptide
  VARIANT (4)..(10): Xaa = Any Amino Acid
  misc_feature (15)..(16): Xaa can be any naturally occurring amino acid
CCEXYCCNPXACTGXXCY

SEQ ID NO: 884 - protein, 18 aa, Artificial Sequence
  Synthetically generated peptide
  VARIANT (4)..(10): Xaa = Any Amino Acid
  misc_feature (15)..(15): Xaa can be any naturally occurring amino acid
  misc_feature (17)..(17): Xaa can be any naturally occurring amino acid
CCEXYCCNPXACTGXCXY

SEQ ID NO: 885 - protein, 17 aa, Artificial Sequence
  Synthetically generated peptide
  VARIANT (4)..(10): Xaa = Any Amino Acid
  misc_feature (16)..(16): Xaa can be any naturally occurring amino acid
CCEXYCCNPXACTGCXY

SEQ ID NO: 886 - protein, 18 aa, Artificial Sequence
  Synthetically generated peptide
  VARIANT (4)..(10): Xaa = Any Amino Acid
  misc_feature (16)..(17): Xaa can be any naturally occurring amino acid
CCEXYCCNPXACTGCXXY

SEQ ID NO: 887 - protein, 16 aa, Artificial Sequence
  Synthetically generated peptide
  VARIANT (4)..(11): Xaa = Any Amino Acid
CCEXYCCNPAXCTGCY

SEQ ID NO: 888 - protein, 17 aa, Artificial Sequence
  Synthetically generated peptide
  VARIANT (4)..(11): Xaa = Any Amino Acid
  misc_feature (12)..(12): Xaa can be any naturally occurring amino acid
CCEXYCCNPAXXCTGCY

SEQ ID NO: 889 - protein, 18 aa, Artificial Sequence
  Synthetically generated peptide
  VARIANT (4)..(11): Xaa = Any Amino Acid
  misc_feature (12)..(13): Xaa can be any naturally occurring amino acid
CCEXYCCNPAXXXCTGCY

SEQ ID NO: 890 - protein, 18 aa, Artificial Sequence
  Synthetically generated peptide
  VARIANT (4)..(11): Xaa = Any Amino Acid
  misc_feature (12)..(12): Xaa can be any naturally occurring amino acid
  misc_feature (14)..(14): Xaa can be any naturally occurring amino acid
CCEXYCCNPAXXCXTGCY

SEQ ID NO: 891 - protein, 18 aa, Artificial Sequence
  Synthetically generated peptide
  VARIANT (4)..(11): Xaa = Any Amino Acid
  misc_feature (12)..(12): Xaa can be any naturally occurring amino acid
  misc_feature (15)..(15): Xaa can be any naturally occurring amino acid
CCEXYCCNPAXXCTXGCY

SEQ ID NO: 892 - protein, 18 aa, Artificial Sequence
  Synthetically generated peptide
  VARIANT (4)..(11): Xaa = Any Amino Acid
  misc_feature (12)..(12): Xaa can be any naturally occurring amino acid
  misc_feature (16)..(16): Xaa can be any naturally occurring amino acid
CCEXYCCNPAXXCTGXCY

SEQ ID NO: 893 - protein, 18 aa, Artificial Sequence
  Synthetically generated peptide
  VARIANT (4)..(11): Xaa = Any Amino Acid
  misc_feature (12)..(12): Xaa can be any naturally occurring amino acid
  misc_feature (17)..(17): Xaa can be any naturally occurring amino acid
CCEXYCCNPAXXCTGCXY

SEQ ID NO: 894 - protein, 17 aa, Artificial Sequence
  Synthetically generated peptide
  VARIANT (4)..(11): Xaa = Any Amino Acid
  misc_feature (13)..(13): Xaa can be any naturally occurring amino acid
CCEXYCCNPAXCXTGCY

SEQ ID NO: 895 - protein, 18 aa, Artificial Sequence
  Synthetically generated peptide
  VARIANT (4)..(11): Xaa = Any Amino Acid
  misc_feature (13)..(14): Xaa can be any naturally occurring amino acid
CCEXYCCNPAXCXXTGCY

SEQ ID NO: 896 - protein, 18 aa, Artificial Sequence
  Synthetically generated peptide
  VARIANT (4)..(11): Xaa = Any Amino Acid
  misc_feature (13)..(13): Xaa can be any naturally occurring amino acid
  misc_feature (15)..(15): Xaa can be any naturally occurring amino acid
CCEXYCCNPAXCXTXGCY

SEQ ID NO: 897 - protein, 18 aa, Artificial Sequence
  Synthetically generated peptide
  VARIANT (4)..(11): Xaa = Any Amino Acid
  misc_feature (13)..(13): Xaa can be any naturally occurring amino acid
  misc_feature (16)..(16): Xaa can be any naturally occurring amino acid
CCEXYCCNPAXCXTGXCY

SEQ ID NO: 898 - protein, 18 aa, Artificial Sequence
  Synthetically generated peptide
  VARIANT (4)..(11): Xaa = Any Amino Acid
  misc_feature (13)..(13): Xaa can be any naturally occurring amino acid
  misc_feature (17)..(17): Xaa can be any naturally occurring amino acid
CCEXYCCNPAXCXTGCXY

SEQ ID NO: 899 - protein, 17 aa, Artificial Sequence
  Synthetically generated peptide
  VARIANT (4)..(11): Xaa = Any Amino Acid
  misc_feature (14)..(14): Xaa can be any naturally occurring amino acid
CCEXYCCNPAXCTXGCY

SEQ ID NO: 900 - protein, 18 aa, Artificial Sequence
  Synthetically generated peptide
  VARIANT (4)..(11): Xaa = Any Amino Acid
  misc_feature (14)..(15): Xaa can be any naturally occurring amino acid
CCEXYCCNPAXCTXXGCY

SEQ ID NO: 901 - protein, 18 aa, Artificial Sequence
  Synthetically generated peptide
  VARIANT (4)..(11): Xaa = Any Amino Acid
  misc_feature (14)..(14): Xaa can be any naturally occurring amino acid
  misc_feature (16)..(16): Xaa can be any naturally occurring amino acid
CCEXYCCNPAXCTXGXCY

SEQ ID NO: 902 - protein, 18 aa, Artificial Sequence
  Synthetically generated peptide
  VARIANT (4)..(11): Xaa = Any Amino Acid
  misc_feature (14)..(14): Xaa can be any naturally occurring amino acid
  misc_feature (17)..(17): Xaa can be any naturally occurring amino acid
CCEXYCCNPAXCTXGCXY

SEQ ID NO: 903 - protein, 17 aa, Artificial Sequence
  Synthetically generated peptide
  VARIANT (4)..(11): Xaa = Any Amino Acid
  misc_feature (15)..(15): Xaa can be any naturally occurring amino acid
CCEXYCCNPAXCTGXCY

SEQ ID NO: 904 - protein, 18 aa, Artificial Sequence
  Synthetically generated peptide
  VARIANT (4)..(11): Xaa = Any Amino Acid
  misc_feature (15)..(16): Xaa can be any naturally occurring amino acid
CCEXYCCNPAXCTGXXCY

SEQ ID NO: 905 - protein, 18 aa, Artificial Sequence
  Synthetically generated peptide
  VARIANT (4)..(11): Xaa = Any Amino Acid
  misc_feature (15)..(15): Xaa can be any naturally occurring amino acid
  misc_feature (17)..(17): Xaa can be any naturally occurring amino acid
CCEXYCCNPAXCTGXCXY

SEQ ID NO: 906 - protein, 17 aa, Artificial Sequence
  Synthetically generated peptide
  VARIANT (4)..(11): Xaa = Any Amino Acid
  misc_feature (16)..(16): Xaa can be any naturally occurring amino acid
CCEXYCCNPAXCTGCXY

SEQ ID NO: 907 - protein, 18 aa, Artificial Sequence
  Synthetically generated peptide
  VARIANT (4)..(11): Xaa = Any Amino Acid
  misc_feature (16)..(17): Xaa can be any naturally occurring amino acid
CCEXYCCNPAXCTGCXXY

SEQ ID NO: 908 - protein, 16 aa, Artificial Sequence
  Synthetically generated peptide
  VARIANT (4)..(12): Xaa = Any Amino Acid
CCEXYCCNPACXTGCY

SEQ ID NO: 909 - protein, 17 aa, Artificial Sequence
  Synthetically generated peptide
  VARIANT (4)..(12): Xaa = Any Amino Acid
  misc_feature (13)..(13): Xaa can be any naturally occurring amino acid
CCEXYCCNPACXXTGCY

SEQ ID NO: 910 - protein, 18 aa, Artificial Sequence
  Synthetically generated peptide
  VARIANT (4)..(12): Xaa = Any Amino Acid
  misc_feature (13)..(14): Xaa can be any naturally occurring amino acid
CCEXYCCNPACXXXTGCY

SEQ ID NO: 911 - protein, 18 aa, Artificial Sequence
  Synthetically generated peptide
  VARIANT (4)..(12): Xaa = Any Amino Acid
  misc_feature (13)..(13): Xaa can be any naturally occurring amino acid
  misc_feature (15)..(15): Xaa can be any naturally occurring amino acid
CCEXYCCNPACXXTXGCY

SEQ ID NO: 912 - protein, 18 aa, Artificial Sequence
  Synthetically generated peptide
  VARIANT (4)..(12): Xaa = Any Amino Acid
  misc_feature (13)..(13): Xaa can be any naturally occurring amino acid
  misc_feature (16)..(16): Xaa can be any naturally occurring amino acid
CCEXYCCNPACXXTGXCY

SEQ ID NO: 913 - protein, 18 aa, Artificial Sequence
  Synthetically generated peptide
  VARIANT (4)..(12): Xaa = Any Amino Acid
  misc_feature (13)..(13): Xaa can be any naturally occurring amino acid
  misc_feature (17)..(17): Xaa can be any naturally occurring amino acid
CCEXYCCNPACXXTGCXY

SEQ ID NO: 914 - protein, 17 aa, Artificial Sequence
  Synthetically generated peptide
  VARIANT (4)..(12): Xaa = Any Amino Acid
  misc_feature (14)..(14): Xaa can be any naturally occurring amino acid
CCEXYCCNPACXTXGCY

SEQ ID NO: 915 - protein, 18 aa, Artificial Sequence
  Synthetically generated peptide
  VARIANT (4)..(12): Xaa = Any Amino Acid
  misc_feature (14)..(15): Xaa can be any naturally occurring amino acid
CCEXYCCNPACXTXXGCY

SEQ ID NO: 916 - protein, 18 aa, Artificial Sequence
  Synthetically generated peptide
  VARIANT (4)..(12): Xaa = Any Amino Acid
  misc_feature (14)..(14): Xaa can be any naturally occurring amino acid
  misc_feature (16)..(16): Xaa can be any naturally occurring amino acid
CCEXYCCNPACXTXGXCY

SEQ ID NO: 917 - protein, 18 aa, Artificial Sequence
  Synthetically generated peptide
  VARIANT (4)..(12): Xaa = Any Amino Acid
  misc_feature (14)..(14): Xaa can be any naturally occurring amino acid
  misc_feature (17)..(17): Xaa can be any naturally occurring amino acid
CCEXYCCNPACXTXGCXY

SEQ ID NO: 918 - protein, 17 aa, Artificial Sequence
  Synthetically generated peptide
  VARIANT (4)..(12): Xaa = Any Amino Acid
  misc_feature (15)..(15): Xaa can be any naturally occurring amino acid
CCEXYCCNPACXTGXCY

SEQ ID NO: 919 - protein, 18 aa, Artificial Sequence
  Synthetically generated peptide
  VARIANT (4)..(12): Xaa = Any Amino Acid
  misc_feature (15)..(16): Xaa can be any naturally occurring amino acid
CCEXYCCNPACXTGXXCY

SEQ ID NO: 920 - protein, 18 aa, Artificial Sequence
  Synthetically generated peptide
  VARIANT (4)..(12): Xaa = Any Amino Acid
  misc_feature (15)..(15): Xaa can be any naturally occurring amino acid
  misc_feature (17)..(17): Xaa can be any naturally occurring amino acid
CCEXYCCNPACXTGXCXY

SEQ ID NO: 921 - protein, 17 aa, Artificial Sequence
  Synthetically generated peptide
  VARIANT (4)..(12): Xaa = Any Amino Acid
  misc_feature (16)..(16): Xaa can be any naturally occurring amino acid
CCEXYCCNPACXTGCXY

SEQ ID NO: 922 - protein, 18 aa, Artificial Sequence
  Synthetically generated peptide
  VARIANT (4)..(12): Xaa = Any Amino Acid
  misc_feature (16)..(17): Xaa can be any naturally occurring amino acid
CCEXYCCNPACXTGCXXY

SEQ ID NO: 923 - protein, 16 aa, Artificial Sequence
  Synthetically generated peptide
  VARIANT (4)..(13): Xaa = Any Amino Acid
CCEXYCCNPACTXGCY

SEQ ID NO: 924 - protein, 17 aa, Artificial Sequence
  Synthetically generated peptide
  VARIANT (4)..(13): Xaa = Any Amino Acid
  misc_feature (14)..(14): Xaa can be any naturally occurring amino acid
CCEXYCCNPACTXXGCY

SEQ ID NO: 925 - protein, 18 aa, Artificial Sequence
  Synthetically generated peptide
  VARIANT (4)..(13): Xaa = Any Amino Acid
  misc_feature (14)..(15): Xaa can be any naturally occurring amino acid
CCEXYCCNPACTXXXGCY

SEQ ID NO: 926 - protein, 18 aa, Artificial Sequence
  Synthetically generated peptide
  VARIANT (4)..(13): Xaa = Any Amino Acid
  misc_feature (14)..(14): Xaa can be any naturally occurring amino acid
  misc_feature (16)..(16): Xaa can be any naturally occurring amino acid
CCEXYCCNPACTXXGXCY

SEQ ID NO: 927 - protein, 18 aa, Artificial Sequence
  Synthetically generated peptide
  VARIANT (4)..(13): Xaa = Any Amino Acid
  misc_feature (14)..(14): Xaa can be any naturally occurring amino acid
  misc_feature (17)..(17): Xaa can be any naturally occurring amino acid
CCEXYCCNPACTXXGCXY

SEQ ID NO: 928 - protein, 17 aa, Artificial Sequence
  Synthetically generated peptide
  VARIANT (4)..(13): Xaa = Any Amino Acid
  misc_feature (15)..(15): Xaa can be any naturally occurring amino acid
CCEXYCCNPACTXGXCY

SEQ ID NO: 929 - protein, 18 aa, Artificial Sequence
  Synthetically generated peptide
  VARIANT (4)..(13): Xaa = Any Amino Acid
  misc_feature (15)..(16): Xaa can be any naturally occurring amino acid
CCEXYCCNPACTXGXXCY

SEQ ID NO: 930 - protein, 18 aa, Artificial Sequence
  Synthetically generated peptide
  VARIANT (4)..(13): Xaa = Any Amino Acid
  misc_feature (15)..(15): Xaa can be any naturally occurring amino acid
  misc_feature (17)..(17): Xaa can be any naturally occurring amino acid
CCEXYCCNPACTXGXCXY

SEQ ID NO: 931 - protein, 17 aa, Artificial Sequence
  Synthetically generated peptide
  VARIANT (4)..(13): Xaa = Any Amino Acid
  misc_feature (16)..(16): Xaa can be any naturally occurring amino acid
CCEXYCCNPACTXGCXY

SEQ ID NO: 932 - protein, 18 aa, Artificial Sequence
  Synthetically generated peptide
  VARIANT (4)..(13): Xaa = Any Amino Acid
  misc_feature (16)..(17): Xaa can be any naturally occurring amino acid
CCEXYCCNPACTXGCXXY

SEQ ID NO: 933 - protein, 16 aa, Artificial Sequence
  Synthetically generated peptide
  VARIANT (4)..(14): Xaa = Any Amino Acid
CCEXYCCNPACTGXCY

SEQ ID NO: 934 - protein, 17 aa, Artificial Sequence
  Synthetically generated peptide
  VARIANT (4)..(14): Xaa = Any Amino Acid
  misc_feature (15)..(15): Xaa can be any naturally occurring amino acid
CCEXYCCNPACTGXXCY

SEQ ID NO: 935 - protein, 18 aa, Artificial Sequence
  Synthetically generated peptide
  VARIANT (4)..(14): Xaa = Any Amino Acid
  misc_feature (15)..(16): Xaa can be any naturally occurring amino acid
CCEXYCCNPACTGXXXCY

SEQ ID NO: 936 - protein, 18 aa, Artificial Sequence
  Synthetically generated peptide
  VARIANT (4)..(14): Xaa = Any Amino Acid
  misc_feature (15)..(15): Xaa can be any naturally occurring amino acid
  misc_feature (17)..(17): Xaa can be any naturally occurring amino acid
CCEXYCCNPACTGXXCXY

SEQ ID NO: 937 - protein, 17 aa, Artificial Sequence
  Synthetically generated peptide
  VARIANT (4)..(14): Xaa = Any Amino Acid
  misc_feature (16)..(16): Xaa can be any naturally occurring amino acid
CCEXYCCNPACTGXCXY

SEQ ID NO: 938 - protein, 18 aa, Artificial Sequence
  Synthetically generated peptide
  VARIANT (4)..(14): Xaa = Any Amino Acid
  misc_feature (16)..(17): Xaa can be any naturally occurring amino acid
CCEXYCCNPACTGXCXXY

SEQ ID NO: 939 - protein, 16 aa, Artificial Sequence
  Synthetically generated peptide
  VARIANT (4)..(15): Xaa = Any Amino Acid
CCEXYCCNPACTGCXY

SEQ ID NO: 940 - protein, 17 aa, Artificial Sequence
  Synthetically generated peptide
  VARIANT (4)..(15): Xaa = Any Amino Acid
  misc_feature (16)..(16): Xaa can be any naturally occurring amino acid
CCEXYCCNPACTGCXXY

SEQ ID NO: 941 - protein, 18 aa, Artificial Sequence
  Synthetically generated peptide
  VARIANT (4)..(15): Xaa = Any Amino Acid
  misc_feature (16)..(17): Xaa can be any naturally occurring amino acid
CCEXYCCNPACTGCXXXY

SEQ ID NO: 942 - protein, 15 aa, Artificial Sequence
  Synthetically generated peptide
  VARIANT (5)..(5): Xaa = Any Amino Acid
CCEYXCCNPACTGCY

SEQ ID NO: 943 - protein, 16 aa, Artificial Sequence
  Synthetically generated peptide
  VARIANT (1)..(16): Xaa = Any Amino Acid
  VARIANT (5)..(6): Xaa = Any Amino Acid
CCEYXXCCNPACTGCY

SEQ ID NO: 944 - protein, 17 aa, Artificial Sequence
  Synthetically generated peptide
  VARIANT (5)..(6): Xaa = Any Amino Acid
  misc_feature (7)..(7): Xaa can be any naturally occurring amino acid
CCEYXXXCCNPACTGCY

SEQ ID NO: 945 - protein, 18 aa, Artificial Sequence
  Synthetically generated peptide
  VARIANT (5)..(6): Xaa = Any Amino Acid
  misc_feature (7)..(8): Xaa can be any naturally occurring amino acid
CCEYXXXXCCNPACTGCY

SEQ ID NO: 946 - protein, 18 aa, Artificial Sequence
  Synthetically generated peptide
  VARIANT (5)..(6): Xaa = Any Amino Acid
  misc_feature (7)..(7): Xaa can be any naturally occurring amino acid
  misc_feature (10)..(10): Xaa can be any naturally occurring amino acid
CCEYXXXCCXNPACTGCY

SEQ ID NO: 947 - protein, 18 aa, Artificial Sequence
  Synthetically generated peptide
  VARIANT (5)..(6): Xaa = Any Amino Acid
  misc_feature (7)..(7): Xaa can be any naturally occurring amino acid
  misc_feature (11)..(11): Xaa can be any naturally occurring amino acid
CCEYXXXCCNXPACTGCY

SEQ ID NO: 948 - protein, 18 aa, Artificial Sequence
  Synthetically generated peptide
  VARIANT (5)..(6): Xaa = Any Amino Acid
  misc_feature (7)..(7): Xaa can be any naturally occurring amino acid
  misc_feature (12)..(12): Xaa can be any naturally occurring amino acid
CCEYXXXCCNPXACTGCY

SEQ ID NO: 949 - protein, 18 aa, Artificial Sequence
  Synthetically generated peptide
  VARIANT (5)..(6): Xaa = Any Amino Acid
  misc_feature (7)..(7): Xaa can be any naturally occurring amino acid
  misc_feature (13)..(13): Xaa can be any naturally occurring amino acid
CCEYXXXCCNPAXCTGCY

SEQ ID NO: 950 - protein, 18 aa, Artificial Sequence
  Synthetically generated peptide
  VARIANT (5)..(6): Xaa = Any Amino Acid
  misc_feature (7)..(7): Xaa can be any naturally occurring amino acid
  misc_feature (14)..(14): Xaa can be any naturally occurring amino acid
CCEYXXXCCNPACXTGCY

SEQ ID NO: 951 - protein, 18 aa, Artificial Sequence
  Synthetically generated peptide
  VARIANT (5)..(6): Xaa = Any Amino Acid
  misc_feature (7)..(7): Xaa can be any naturally occurring amino acid
  misc_feature (15)..(15): Xaa can be any naturally occurring amino acid
CCEYXXXCCNPACTXGCY

SEQ ID NO: 952 - protein, 18 aa, Artificial Sequence
  Synthetically generated peptide
  VARIANT (5)..(6): Xaa = Any Amino Acid
  misc_feature (7)..(7): Xaa can be any naturally occurring amino acid
  misc_feature (16)..(16): Xaa can be any naturally occurring amino acid
CCEYXXXCCNPACTGXCY

SEQ ID NO: 953 - protein, 18 aa, Artificial Sequence
  Synthetically generated peptide
  VARIANT (5)..(6): Xaa = Any Amino Acid
  misc_feature (7)..(7): Xaa can be any naturally occurring amino acid
  misc_feature (17)..(17): Xaa can be any naturally occurring amino acid
CCEYXXXCCNPACTGCXY

SEQ ID NO: 954 - protein, 17 aa, Artificial Sequence
  Synthetically generated peptide
  VARIANT (5)..(6): Xaa = Any Amino Acid
  misc_feature (9)..(9): Xaa can be any naturally occurring amino acid
CCEYXXCCXNPACTGCY

SEQ ID NO: 955 - protein, 18 aa, Artificial Sequence
  Synthetically generated peptide
  VARIANT (5)..(6): Xaa = Any Amino Acid
  misc_feature (9)..(10): Xaa can be any naturally occurring amino acid
CCEYXXCCXXNPACTGCY

SEQ ID NO: 956 - protein, 18 aa, Artificial Sequence
  Synthetically generated peptide
  VARIANT (5)..(6): Xaa = Any Amino Acid
  misc_feature (9)..(9): Xaa can be any naturally occurring amino acid
  misc_feature (11)..(11): Xaa can be any naturally occurring amino acid
CCEYXXCCXNXPACTGCY

SEQ ID NO: 957 - protein, 18 aa, Artificial Sequence
  Synthetically generated peptide
  VARIANT (5)..(6): Xaa = Any Amino Acid
  misc_feature (9)..(9): Xaa can be any naturally occurring amino acid
  misc_feature (12)..(12): Xaa can be any naturally occurring amino acid
CCEYXXCCXNPXACTGCY

SEQ ID NO: 958 - protein, 18 aa, Artificial Sequence
  Synthetically generated peptide
  VARIANT (5)..(6): Xaa = Any Amino Acid
  misc_feature (9)..(9): Xaa can be any naturally occurring amino acid
  misc_feature (13)..(13): Xaa can be any naturally occurring amino acid
CCEYXXCCXNPAXCTGCY

SEQ ID NO: 959 - protein, 18 aa, Artificial Sequence
  Synthetically generated peptide
  VARIANT (5)..(6): Xaa = Any Amino Acid
  misc_feature (9)..(9): Xaa can be any naturally occurring amino acid
  misc_feature (14)..(14): Xaa can be any naturally occurring amino acid
CCEYXXCCXNPACXTGCY

SEQ ID NO: 960 - protein, 18 aa, Artificial Sequence
  Synthetically generated peptide
  VARIANT (5)..(6): Xaa = Any Amino Acid
  misc_feature (9)..(9): Xaa can be any naturally occurring amino acid
  misc_feature (15)..(15): Xaa can be any naturally occurring amino acid
CCEYXXCCXNPACTXGCY

SEQ ID NO: 961 - protein, 18 aa, Artificial Sequence
  Synthetically generated peptide
  VARIANT (5)..(6): Xaa = Any Amino Acid
  misc_feature (9)..(9): Xaa can be any naturally occurring amino acid
  misc_feature (16)..(16): Xaa can be any naturally occurring amino acid
CCEYXXCCXNPACTGXCY

SEQ ID NO: 962 - protein, 18 aa, Artificial Sequence
  Synthetically generated peptide
  VARIANT (5)..(6): Xaa = Any Amino Acid
  misc_feature (9)..(9): Xaa can be any naturally occurring amino acid
  misc_feature (17)..(17): Xaa can be any naturally occurring amino acid
CCEYXXCCXNPACTGCXY

SEQ ID NO: 963 - protein, 17 aa, Artificial Sequence
  Synthetically generated peptide
  VARIANT (5)..(6): Xaa = Any Amino Acid
  misc_feature (10)..(10): Xaa can be any naturally occurring amino acid
CCEYXXCCNXPACTGCY

SEQ ID NO: 964 - protein, 18 aa, Artificial Sequence
  Synthetically generated peptide
  VARIANT (5)..(6): Xaa = Any Amino Acid
  misc_feature (10)..(11): Xaa can be any naturally occurring amino acid
CCEYXXCCNXXPACTGCY

SEQ ID NO: 965 - protein, 18 aa, Artificial Sequence
  Synthetically generated peptide
  VARIANT (5)..(6): Xaa = Any Amino Acid
  misc_feature (10)..(10): Xaa can be any naturally occurring amino acid
  misc_feature (12)..(12): Xaa can be any naturally occurring amino acid
CCEYXXCCNXPXACTGCY

SEQ ID NO: 966 - protein, 18 aa, Artificial Sequence
  Synthetically generated peptide
  VARIANT (5)..(6): Xaa = Any Amino Acid
  misc_feature (10)..(10): Xaa can be any naturally occurring amino acid
  misc_feature (13)..(13): Xaa can be any naturally occurring amino acid
CCEYXXCCNXPAXCTGCY

SEQ ID NO: 967 - protein, 18 aa, Artificial Sequence
  Synthetically generated peptide
  VARIANT (5)..(6): Xaa = Any Amino Acid
  misc_feature (10)..(10): Xaa can be any naturally occurring amino acid
  misc_feature (14)..(14): Xaa can be any naturally occurring amino acid
CCEYXXCCNXPACXTGCY

SEQ ID NO: 968 - protein, 18 aa, Artificial Sequence
  Synthetically generated peptide
  VARIANT (5)..(6): Xaa = Any Amino Acid
  misc_feature (10)..(10): Xaa can be any naturally occurring amino acid
  misc_feature (15)..(15): Xaa can be any naturally occurring amino acid
CCEYXXCCNXPACTXGCY

SEQ ID NO: 969 - protein, 18 aa, Artificial Sequence
  Synthetically generated peptide
  VARIANT (5)..(6): Xaa = Any Amino Acid
  misc_feature (10)..(10): Xaa can be any naturally occurring amino acid
  misc_feature (16)..(16): Xaa can be any naturally occurring amino acid
CCEYXXCCNXPACTGXCY

SEQ ID NO: 970 - protein, 18 aa, Artificial Sequence
  Synthetically generated peptide
  VARIANT (5)..(6): Xaa = Any Amino Acid
  misc_feature (10)..(10): Xaa can be any naturally occurring amino acid
  misc_feature (17)..(17): Xaa can be any naturally occurring amino acid
CCEYXXCCNXPACTGCXY

SEQ ID NO: 971 - protein, 17 aa, Artificial Sequence
  Synthetically generated peptide
  VARIANT (5)..(6): Xaa = Any Amino Acid
  misc_feature (11)..(11): Xaa can be any naturally occurring amino acid
CCEYXXCCNPXACTGCY

SEQ ID NO: 972 - protein, 18 aa, Artificial Sequence
  Synthetically generated peptide
  VARIANT (5)..(6): Xaa = Any Amino Acid
  misc_feature (11)..(12): Xaa can be any naturally occurring amino acid
CCEYXXCCNPXXACTGCY

SEQ ID NO: 973 - protein, 18 aa, Artificial Sequence
  Synthetically generated peptide
  VARIANT (5)..(6): Xaa = Any Amino Acid
  misc_feature (11)..(11): Xaa can be any naturally occurring amino acid
  misc_feature (13)..(13): Xaa can be any naturally occurring amino acid
CCEYXXCCNPXAXCTGCY

SEQ ID NO: 974 - protein, 18 aa, Artificial Sequence
  Synthetically generated peptide
  VARIANT (5)..(6): Xaa = Any Amino Acid
  misc_feature (11)..(11): Xaa can be any naturally occurring amino acid
  misc_feature (14)..(14): Xaa can be any naturally occurring amino acid
CCEYXXCCNPXACXTGCY

SEQ ID NO: 975 - protein, 18 aa, Artificial Sequence
  Synthetically generated peptide
  VARIANT (5)..(6): Xaa = Any Amino Acid
  misc_feature (11)..(11): Xaa can be any naturally occurring amino acid
  misc_feature (15)..(15): Xaa can be any naturally occurring amino acid
CCEYXXCCNPXACTXGCY

SEQ ID NO: 976 - protein, 18 aa, Artificial Sequence
  Synthetically generated peptide
  VARIANT (5)..(6): Xaa = Any Amino Acid
  misc_feature (11)..(11): Xaa can be any naturally occurring amino acid
  misc_feature (16)..(16): Xaa can be any naturally occurring amino acid
CCEYXXCCNPXACTGXCY

SEQ ID NO: 977 - protein, 18 aa, Artificial Sequence
  Synthetically generated peptide
  VARIANT (5)..(6): Xaa = Any Amino Acid
  misc_feature (11)..(11): Xaa can be any naturally occurring amino acid
  misc_feature (17)..(17): Xaa can be any naturally occurring amino acid
CCEYXXCCNPXACTGCXY

SEQ ID NO: 978 - protein, 17 aa, Artificial Sequence
  Synthetically generated peptide
  VARIANT (5)..(6): Xaa = Any Amino Acid
  misc_feature (12)..(12): Xaa can be any naturally occurring amino acid
CCEYXXCCNPAXCTGCY

SEQ ID NO: 979 - protein, 18 aa, Artificial Sequence
  Synthetically generated peptide
  VARIANT (5)..(6): Xaa = Any Amino Acid
  misc_feature (12)..(13): Xaa can be any naturally occurring amino acid
CCEYXXCCNPAXXCTGCY

SEQ ID NO: 980 - protein, 18 aa, Artificial Sequence
  Synthetically generated peptide
  VARIANT (5)..(6): Xaa = Any Amino Acid
  misc_feature (12)..(12): Xaa can be any naturally occurring amino acid
  misc_feature (14)..(14): Xaa can be any naturally occurring amino acid
CCEYXXCCNPAXCXTGCY

SEQ ID NO: 981 - protein, 18 aa, Artificial Sequence
  Synthetically generated peptide
  VARIANT (5)..(6): Xaa = Any Amino Acid
  misc_feature (12)..(12): Xaa can be any naturally occurring amino acid
  misc_feature (15)..(15): Xaa can be any naturally occurring amino acid
CCEYXXCCNPAXCTXGCY

SEQ ID NO: 982 - protein, 18 aa, Artificial Sequence
  Synthetically generated peptide
  VARIANT (5)..(6): Xaa = Any Amino Acid
  misc_feature (12)..(12): Xaa can be any naturally occurring amino acid
  misc_feature (16)..(16): Xaa can be any naturally occurring amino acid
CCEYXXCCNPAXCTGXCY

SEQ ID NO: 983 - protein, 18 aa, Artificial Sequence
  Synthetically generated peptide
  VARIANT (5)..(6): Xaa = Any Amino Acid
  misc_feature (12)..(12): Xaa can be any naturally occurring amino acid
  misc_feature (17)..(17): Xaa can be any naturally occurring amino acid
CCEYXXCCNPAXCTGCXY

SEQ ID NO: 984 - protein, 17 aa, Artificial Sequence
  Synthetically generated peptide
  VARIANT (5)..(6): Xaa = Any Amino Acid
  misc_feature (13)..(13): Xaa can be any naturally occurring amino acid
CCEYXXCCNPACXTGCY

SEQ ID NO: 985 - protein, 18 aa, Artificial Sequence
  Synthetically generated peptide
  VARIANT (5)..(6): Xaa = Any Amino Acid
  misc_feature (13)..(14): Xaa can be any naturally occurring amino acid
CCEYXXCCNPACXXTGCY

SEQ ID NO: 986 - protein, 18 aa, Artificial Sequence
  Synthetically generated peptide
  VARIANT (5)..(6): Xaa = Any Amino Acid
  misc_feature (13)..(13): Xaa can be any naturally occurring amino acid
  misc_feature (15)..(15): Xaa can be any naturally occurring amino acid
CCEYXXCCNPACXTXGCY

SEQ ID NO: 987 - protein, 18 aa, Artificial Sequence
  Synthetically generated peptide
  VARIANT (5)..(6): Xaa = Any Amino Acid
  misc_feature (13)..(13): Xaa can be any naturally occurring amino acid
  misc_feature (16)..(16): Xaa can be any naturally occurring amino acid
CCEYXXCCNPACXTGXCY

SEQ ID NO: 988 - protein, 18 aa, Artificial Sequence
  Synthetically generated peptide
  VARIANT (5)..(6): Xaa = Any Amino Acid
  misc_feature (13)..(13): Xaa can be any naturally occurring amino acid
  misc_feature (17)..(17): Xaa can be any naturally occurring amino acid
CCEYXXCCNPACXTGCXY

SEQ ID NO: 989 - protein, 17 aa, Artificial Sequence
  Synthetically generated peptide
  VARIANT (5)..(6): Xaa = Any Amino Acid
  misc_feature (14)..(14): Xaa can be any naturally occurring amino acid
CCEYXXCCNPACTXGCY

SEQ ID NO: 990 - protein, 18 aa, Artificial Sequence
  Synthetically generated peptide
  VARIANT (5)..(6): Xaa = Any Amino Acid
  misc_feature (14)..(15): Xaa can be any naturally occurring amino acid
CCEYXXCCNPACTXXGCY

SEQ ID NO: 991 - protein, 18 aa, Artificial Sequence
  Synthetically generated peptide
  VARIANT (5)..(6): Xaa = Any Amino Acid
  misc_feature (14)..(14): Xaa can be any naturally occurring amino acid
  misc_feature (16)..(16): Xaa can be any naturally occurring amino acid
CCEYXXCCNPACTXGXCY

SEQ ID NO: 992 - protein, 18 aa, Artificial Sequence
  Synthetically generated peptide
  VARIANT (5)..(6): Xaa = Any Amino Acid
  misc_feature (14)..(14): Xaa can be any naturally occurring amino acid
  misc_feature (17)..(17): Xaa can be any naturally occurring amino acid
CCEYXXCCNPACTXGCXY

SEQ ID NO: 993 - protein, 17 aa, Artificial Sequence
  Synthetically generated peptide
  VARIANT (5)..(6): Xaa = Any Amino Acid
  misc_feature (15)..(15): Xaa can be any naturally occurring amino acid
CCEYXXCCNPACTGXCY

SEQ ID NO: 994 - protein, 18 aa, Artificial Sequence
  Synthetically generated peptide
  VARIANT (5)..(6): Xaa = Any Amino Acid
  misc_feature (15)..(16): Xaa can be any naturally occurring amino acid
CCEYXXCCNPACTGXXCY

SEQ ID NO: 995 - protein, 18 aa, Artificial Sequence
  Synthetically generated peptide
  VARIANT (5)..(6): Xaa = Any Amino Acid
  misc_feature (15)..(15): Xaa can be any naturally occurring amino acid
  misc_feature (17)..(17): Xaa can be any naturally occurring amino acid
CCEYXXCCNPACTGXCXY

SEQ ID NO: 996 - protein, 17 aa, Artificial Sequence
  Synthetically generated peptide
  VARIANT (5)..(6): Xaa = Any Amino Acid
  misc_feature (16)..(16): Xaa can be any naturally occurring amino acid
CCEYXXCCNPACTGCXY

SEQ ID NO: 997 - protein, 18 aa, Artificial Sequence
  Synthetically generated peptide
  VARIANT (5)..(6): Xaa = Any Amino Acid
  misc_feature (16)..(17): Xaa can be any naturally occurring amino acid
CCEYXXCCNPACTGCXXY

SEQ ID NO: 998 - protein, 16 aa, Artificial Sequence
  Synthetically generated peptide
  VARIANT (5)..(8): Xaa = Any Amino Acid
CCEYXCCXNPACTGCY

SEQ ID NO: 999 - protein, 17 aa, Artificial Sequence
  Synthetically generated peptide
  VARIANT (5)..(8): Xaa = Any Amino Acid
  misc_feature (9)..(9): Xaa can be any naturally occurring amino acid
CCEYXCCXXNPACTGCY

SEQ ID NO: 1000 - protein, 18 aa, Artificial Sequence
  Synthetically generated peptide
  VARIANT (5)..(8): Xaa = Any Amino Acid
  misc_feature (9)..(10): Xaa can be any naturally occurring amino acid
CCEYXCCXXXNPACTGCY

SEQ ID NO: 1001 - protein, 18 aa, Artificial Sequence
  Synthetically generated peptide
  VARIANT (5)..(8): Xaa = Any Amino Acid
  misc_feature (9)..(9): Xaa can be any naturally occurring amino acid
  misc_feature (11)..(11): Xaa can be any naturally occurring amino acid
CCEYXCCXXNXPACTGCY

SEQ ID NO: 1002 - protein, 18 aa, Artificial Sequence
  Synthetically generated peptide
  VARIANT (5)..(8): Xaa = Any Amino Acid
  misc_feature (9)..(9): Xaa can be any naturally occurring amino acid
  misc_feature (12)..(12): Xaa can be any naturally occurring amino acid
CCEYXCCXXNPXACTGCY

SEQ ID NO: 1003 - protein, 18 aa, Artificial Sequence
  Synthetically generated peptide
  VARIANT (5)..(8): Xaa = Any Amino Acid
  misc_feature (9)..(9): Xaa can be any naturally occurring amino acid
  misc_feature (13)..(13): Xaa can be any naturally occurring amino acid
CCEYXCCXXNPAXCTGCY

SEQ ID NO: 1004 - protein, 18 aa, Artificial Sequence
  Synthetically generated peptide
  VARIANT (5)..(8): Xaa = Any Amino Acid
  misc_feature (9)..(9): Xaa can be any naturally occurring amino acid
  misc_feature (14)..(14): Xaa can be any naturally occurring amino acid
CCEYXCCXXNPACXTGCY

SEQ ID NO: 1005 - protein, 18 aa, Artificial Sequence
  Synthetically generated peptide
  VARIANT (5)..(8): Xaa = Any Amino Acid
  misc_feature (9)..(9): Xaa can be any naturally occurring amino acid
  misc_feature (15)..(15): Xaa can be any naturally occurring amino acid
CCEYXCCXXNPACTXGCY

SEQ ID NO: 1006 - protein, 18 aa, Artificial Sequence
  Synthetically generated peptide
  VARIANT (5)..(8): Xaa = Any Amino Acid
  misc_feature (9)..(9): Xaa can be any naturally occurring amino acid
  misc_feature (16)..(16): Xaa can be any naturally occurring amino acid
CCEYXCCXXNPACTGXCY

SEQ ID NO: 1007 - protein, 18 aa, Artificial Sequence
  Synthetically generated peptide
  VARIANT (5)..(8): Xaa = Any Amino Acid
  misc_feature (9)..(9): Xaa can be any naturally occurring amino acid
  misc_feature (17)..(17): Xaa can be any naturally occurring amino acid
CCEYXCCXXNPACTGCXY

SEQ ID NO: 1008 - protein, 17 aa, Artificial Sequence
  Synthetically generated peptide
  VARIANT (5)..(8): Xaa = Any Amino Acid
  misc_feature (10)..(10): Xaa can be any naturally occurring amino acid
CCEYXCCXNXPACTGCY

SEQ ID NO: 1009 - protein, 18 aa, Artificial Sequence
  Synthetically generated peptide
  VARIANT (5)..(8): Xaa = Any Amino Acid
  misc_feature (10)..(11): Xaa can be any naturally occurring amino acid
CCEYXCCXNXXPACTGCY

SEQ ID NO: 1010 - protein, 18 aa, Artificial Sequence
  Synthetically generated peptide
  VARIANT (5)..(8): Xaa = Any Amino Acid
  misc_feature (10)..(10): Xaa can be any naturally occurring amino acid
  misc_feature (12)..(12): Xaa can be any naturally occurring amino acid
CCEYXCCXNXPXACTGCY

SEQ ID NO: 1011 - protein, 18 aa, Artificial Sequence
  Synthetically generated peptide
  VARIANT (5)..(8): Xaa = Any Amino Acid
  misc_feature (10)..(10): Xaa can be any naturally occurring amino acid
  misc_feature (13)..(13): Xaa can be any naturally occurring amino acid
CCEYXCCXNXPAXCTGCY

SEQ ID NO: 1012 - protein, 18 aa, Artificial Sequence
  Synthetically generated peptide
  VARIANT (5)..(8): Xaa = Any Amino Acid
  misc_feature (10)..(10): Xaa can be any naturally occurring amino acid
  misc_feature (14)..(14): Xaa can be any naturally occurring amino acid
CCEYXCCXNXPACXTGCY

SEQ ID NO: 1013 - protein, 18 aa, Artificial Sequence
  Synthetically generated peptide
  VARIANT (5)..(8): Xaa = Any Amino Acid
  misc_feature (10)..(10): Xaa can be any naturally occurring amino acid
  misc_feature (15)..(15): Xaa can be any naturally occurring amino acid
CCEYXCCXNXPACTXGCY

SEQ ID NO: 1014 - protein, 18 aa, Artificial Sequence
  Synthetically generated peptide
  VARIANT (5)..(8): Xaa = Any Amino Acid
  misc_feature (10)..(10): Xaa can be any naturally occurring amino acid
  misc_feature (16)..(16): Xaa can be any naturally occurring amino acid
CCEYXCCXNXPACTGXCY

SEQ ID NO: 1015 - protein, 18 aa, Artificial Sequence
  Synthetically generated peptide
  VARIANT (5)..(8): Xaa = Any Amino Acid
  misc_feature (10)..(10): Xaa can be any naturally occurring amino acid
  misc_feature (17)..(17): Xaa can be any naturally occurring amino acid
CCEYXCCXNXPACTGCXY

SEQ ID NO: 1016 - protein, 17 aa, Artificial Sequence
  Synthetically generated peptide
  VARIANT (5)..(8): Xaa = Any Amino Acid
  misc_feature (11)..(11): Xaa can be any naturally occurring amino acid
CCEYXCCXNPXACTGCY

SEQ ID NO: 1017 - protein, 18 aa, Artificial Sequence
  Synthetically generated peptide
  VARIANT (5)..(8): Xaa = Any Amino Acid
  misc_feature (11)..(12): Xaa can be any naturally occurring amino acid
CCEYXCCXNPXXACTGCY

SEQ ID NO: 1018 - protein, 18 aa, Artificial Sequence
  Synthetically generated peptide
  VARIANT (5)..(8): Xaa = Any Amino Acid
  misc_feature (11)..(11): Xaa can be any naturally occurring amino acid
  misc_feature (13)..(13): Xaa can be any naturally occurring amino acid
CCEYXCCXNPXAXCTGCY

SEQ ID NO: 1019 - protein, 18 aa, Artificial Sequence
  Synthetically generated peptide
  VARIANT (5)..(8): Xaa = Any Amino Acid
  misc_feature (11)..(11): Xaa can be any naturally occurring amino acid
  misc_feature (14)..(14): Xaa can be any naturally occurring amino acid
CCEYXCCXNPXACXTGCY

SEQ ID NO: 1020 - protein, 18 aa, Artificial Sequence
  Synthetically generated peptide
  VARIANT (5)..(8): Xaa = Any Amino Acid
  misc_feature (11)..(11): Xaa can be any naturally occurring amino acid
  misc_feature (15)..(15): Xaa can be any naturally occurring amino acid
CCEYXCCXNPXACTXGCY

SEQ ID NO: 1021 - protein, 18 aa, Artificial Sequence
  Synthetically generated peptide
  VARIANT (5)..(8): Xaa = Any Amino Acid
  misc_feature (11)..(11): Xaa can be any naturally occurring amino acid
  misc_feature (16)..(16): Xaa can be any naturally occurring amino acid
CCEYXCCXNPXACTGXCY

SEQ ID NO: 1022 - protein, 18 aa, Artificial Sequence
  Synthetically generated peptide
  VARIANT (5)..(8): Xaa = Any Amino Acid
  misc_feature (11)..(11): Xaa can be any naturally occurring amino acid
  misc_feature (17)..(17): Xaa can be any naturally occurring amino acid
CCEYXCCXNPXACTGCXY

SEQ ID NO: 1023 - protein, 17 aa, Artificial Sequence
  Synthetically generated peptide
  VARIANT (5)..(8): Xaa = Any Amino Acid
  misc_feature (12)..(12): Xaa can be any naturally occurring amino acid
CCEYXCCXNPAXCTGCY

SEQ ID NO: 1024 - protein, 18 aa, Artificial Sequence
  Synthetically generated peptide
  VARIANT (5)..(8): Xaa = Any Amino Acid
  misc_feature (12)..(13): Xaa can be any naturally occurring amino acid
CCEYXCCXNPAXXCTGCY

SEQ ID NO: 1025 - protein, 18 aa, Artificial Sequence
  Synthetically generated peptide
  VARIANT (5)..(8): Xaa = Any Amino Acid
  misc_feature (12)..(12): Xaa can be any naturally occurring amino acid
  misc_feature (14)..(14): Xaa can be any naturally occurring amino acid
CCEYXCCXNPAXCXTGCY

SEQ ID NO: 1026 - protein, 18 aa, Artificial Sequence
  Synthetically generated peptide
  VARIANT (5)..(8): Xaa = Any Amino Acid
  misc_feature (12)..(12): Xaa can be any naturally occurring amino acid
  misc_feature (15)..(15): Xaa can be any naturally occurring amino acid
CCEYXCCXNPAXCTXGCY

SEQ ID NO: 1027 - protein, 18 aa, Artificial Sequence
  Synthetically generated peptide
  VARIANT (5)..(8): Xaa = Any Amino Acid
  misc_feature (12)..(12): Xaa can be any naturally occurring amino acid
  misc_feature (16)..(16): Xaa can be any naturally occurring amino acid
CCEYXCCXNPAXCTGXCY

SEQ ID NO: 1028 - protein, 18 aa, Artificial Sequence
  Synthetically generated peptide
  VARIANT (5)..(8): Xaa = Any Amino Acid
  misc_feature (12)..(12): Xaa can be any naturally occurring amino acid
  misc_feature (17)..(17): Xaa can be any naturally occurring amino acid
CCEYXCCXNPAXCTGCXY

SEQ ID NO: 1029 - protein, 17 aa, Artificial Sequence
  Synthetically generated peptide
  VARIANT (5)..(8): Xaa = Any Amino Acid
  misc_feature (13)..(13): Xaa can be any naturally occurring amino acid
CCEYXCCXNPACXTGCY

SEQ ID NO: 1030 - protein, 18 aa, Artificial Sequence
  Synthetically generated peptide
  VARIANT (5)..(8): Xaa = Any Amino Acid
  misc_feature (13)..(14): Xaa can be any naturally occurring amino acid
CCEYXCCXNPACXXTGCY

SEQ ID NO: 1031 - protein, 18 aa, Artificial Sequence
  Synthetically generated peptide
  VARIANT (5)..(8): Xaa = Any Amino Acid
  misc_feature (13)..(13): Xaa can be any naturally occurring amino acid
  misc_feature (15)..(15): Xaa can be any naturally occurring amino acid
CCEYXCCXNPACXTXGCY

SEQ ID NO: 1032 - protein, 18 aa, Artificial Sequence
  Synthetically generated peptide
  VARIANT (5)..(8): Xaa = Any Amino Acid
  misc_feature (13)..(13): Xaa can be any naturally occurring amino acid
  misc_feature (16)..(16): Xaa can be any naturally occurring amino acid
CCEYXCCXNPACXTGXCY

SEQ ID NO: 1033 - protein, 18 aa, Artificial Sequence
  Synthetically generated peptide
  VARIANT (5)..(8): Xaa = Any Amino Acid
  misc_feature (13)..(13): Xaa can be any naturally occurring amino acid
  misc_feature (17)..(17): Xaa can be any naturally occurring amino acid
CCEYXCCXNPACXTGCXY

SEQ ID NO: 1034 - protein, 17 aa, Artificial Sequence
  Synthetically generated peptide
  VARIANT (5)..(8): Xaa = Any Amino Acid
  misc_feature (14)..(14): Xaa can be any naturally occurring amino acid
CCEYXCCXNPACTXGCY

SEQ ID NO: 1035 - protein, 18 aa, Artificial Sequence
  Synthetically generated peptide
  VARIANT (5)..(8): Xaa = Any Amino Acid
  misc_feature (14)..(15): Xaa can be any naturally occurring amino acid
CCEYXCCXNPACTXXGCY

SEQ ID NO: 1036 - protein, 18 aa, Artificial Sequence
  Synthetically generated peptide
  VARIANT (5)..(8): Xaa = Any Amino Acid
  misc_feature (14)..(14): Xaa can be any naturally occurring amino acid
  misc_feature (16)..(16): Xaa can be any naturally occurring amino acid
CCEYXCCXNPACTXGXCY

SEQ ID NO: 1037 - protein, 18 aa, Artificial Sequence
  Synthetically generated peptide
  VARIANT (5)..(8): Xaa = Any Amino Acid
  misc_feature (14)..(14): Xaa can be any naturally occurring amino acid
  misc_feature (17)..(17): Xaa can be any naturally occurring amino acid
CCEYXCCXNPACTXGCXY

SEQ ID NO: 1038 - protein, 17 aa, Artificial Sequence
  Synthetically generated peptide
  VARIANT (5)..(8): Xaa = Any Amino Acid
  misc_feature (15)..(15): Xaa can be any naturally occurring amino acid
CCEYXCCXNPACTGXCY

SEQ ID NO: 1039 - protein, 18 aa, Artificial Sequence
  Synthetically generated peptide
  VARIANT (5)..(8): Xaa = Any Amino Acid
  misc_feature (15)..(16): Xaa can be any naturally occurring amino acid
CCEYXCCXNPACTGXXCY

SEQ ID NO: 1040 - protein, 18 aa, Artificial Sequence
  Synthetically generated peptide
  VARIANT (5)..(8): Xaa = Any Amino Acid
  misc_feature (15)..(15): Xaa can be any naturally occurring amino acid
  misc_feature (17)..(17): Xaa can be any naturally occurring amino acid
CCEYXCCXNPACTGXCXY

SEQ ID NO: 1041 - protein, 17 aa, Artificial Sequence
  Synthetically generated peptide
  VARIANT (5)..(8): Xaa = Any Amino Acid
  misc_feature (16)..(16): Xaa can be any naturally occurring amino acid
CCEYXCCXNPACTGCXY

SEQ ID NO: 1042 - protein, 18 aa, Artificial Sequence
  Synthetically generated peptide
  VARIANT (5)..(8): Xaa = Any Amino Acid
  misc_feature (16)..(17): Xaa can be any naturally occurring amino acid
CCEYXCCXNPACTGCXXY

SEQ ID NO: 1043 - protein, 16 aa, Artificial Sequence
  Synthetically generated peptide
  VARIANT (5)..(9): Xaa = Any Amino Acid
CCEYXCCNXPACTGCY

SEQ ID NO: 1044 - protein, 17 aa, Artificial Sequence
  Synthetically generated peptide
  VARIANT (5)..(9): Xaa = Any Amino Acid
  misc_feature (10)..(10): Xaa can be any naturally occurring amino acid
CCEYXCCNXXPACTGCY

SEQ ID NO: 1045 - protein, 18 aa, Artificial Sequence
  Synthetically generated peptide
  VARIANT (5)..(9): Xaa = Any Amino Acid
  misc_feature (10)..(11): Xaa can be any naturally occurring amino acid
CCEYXCCNXXXPACTGCY

SEQ ID NO: 1046 - protein, 18 aa, Artificial Sequence
  Synthetically generated peptide
  VARIANT (5)..(9): Xaa = Any Amino Acid
  misc_feature (10)..(10): Xaa can be any naturally occurring amino acid
  misc_feature (12)..(12): Xaa can be any naturally occurring amino acid
CCEYXCCNXXPXACTGCY

SEQ ID NO: 1047 - protein, 18 aa, Artificial Sequence
  Synthetically generated peptide
  VARIANT (5)..(9): Xaa = Any Amino Acid
  misc_feature (10)..(10): Xaa can be any naturally occurring amino acid
  misc_feature (13)..(13): Xaa can be any naturally occurring amino acid
CCEYXCCNXXPAXCTGCY

SEQ ID NO: 1048 - protein, 18 aa, Artificial Sequence
  Synthetically generated peptide
  VARIANT (5)..(9): Xaa = Any Amino Acid
  misc_feature (10)..(10): Xaa can be any naturally occurring amino acid
  misc_feature (14)..(14): Xaa can be any naturally occurring amino acid
CCEYXCCNXXPACXTGCY

SEQ ID NO: 1049 - protein, 18 aa, Artificial Sequence
  Synthetically generated peptide
  VARIANT (5)..(9): Xaa = Any Amino Acid
  misc_feature (10)..(10): Xaa can be any naturally occurring amino acid
  misc_feature (15)..(15): Xaa can be any naturally occurring amino acid
CCEYXCCNXXPACTXGCY

SEQ ID NO: 1050 - protein, 18 aa, Artificial Sequence
  Synthetically generated peptide
  VARIANT (5)..(9): Xaa = Any Amino Acid
  misc_feature (10)..(10): Xaa can be any naturally occurring amino acid
  misc_feature (16)..(16): Xaa can be any naturally occurring amino acid
CCEYXCCNXXPACTGXCY

SEQ ID NO: 1051 - protein, 18 aa, Artificial Sequence
  Synthetically generated peptide
  VARIANT (5)..(9): Xaa = Any Amino Acid
  misc_feature (10)..(10): Xaa can be any naturally occurring amino acid
  misc_feature (17)..(17): Xaa can be any naturally occurring amino acid
CCEYXCCNXXPACTGCXY

SEQ ID NO: 1052 - protein, 17 aa, Artificial Sequence
  Synthetically generated peptide
  VARIANT (5)..(9): Xaa = Any Amino Acid
  misc_feature (11)..(11): Xaa can be any naturally occurring amino acid
CCEYXCCNXPXACTGCY

SEQ ID NO: 1053 - protein, 18 aa, Artificial Sequence
  Synthetically generated peptide
  VARIANT (5)..(9): Xaa = Any Amino Acid
  misc_feature (11)..(12): Xaa can be any naturally occurring amino acid
CCEYXCCNXPXXACTGCY

SEQ ID NO: 1054 - protein, 18 aa, Artificial Sequence
  Synthetically generated peptide
  VARIANT (5)..(9): Xaa = Any Amino Acid
  misc_feature (11)..(11): Xaa can be any naturally occurring amino acid
  misc_feature (13)..(13): Xaa can be any naturally occurring amino acid
CCEYXCCNXPXAXCTGCY

SEQ ID NO: 1055 - protein, 18 aa, Artificial Sequence
  Synthetically generated peptide
  VARIANT (5)..(9): Xaa = Any Amino Acid
  misc_feature (11)..(11): Xaa can be any naturally occurring amino acid
  misc_feature (14)..(14): Xaa can be any naturally occurring amino acid
CCEYXCCNXPXACXTGCY

SEQ ID NO: 1056 - protein, 18 aa, Artificial Sequence
  Synthetically generated peptide
  VARIANT (5)..(9): Xaa = Any Amino Acid
  misc_feature (11)..(11): Xaa can be any naturally occurring amino acid
  misc_feature (15)..(15): Xaa can be any naturally occurring amino acid
CCEYXCCNXPXACTXGCY

SEQ ID NO: 1057 - protein, 18 aa, Artificial Sequence
  Synthetically generated peptide
  VARIANT (5)..(9): Xaa = Any Amino Acid
  misc_feature (11)..(11): Xaa can be any naturally occurring amino acid
  misc_feature (16)..(16): Xaa can be any naturally occurring amino acid
CCEYXCCNXPXACTGXCY

SEQ ID NO: 1058 - protein, 18 aa, Artificial Sequence
  Synthetically generated peptide
  VARIANT (5)..(9): Xaa = Any Amino Acid
  misc_feature (11)..(11): Xaa can be any naturally occurring amino acid
  misc_feature (17)..(17): Xaa can be any naturally occurring amino acid
CCEYXCCNXPXACTGCXY

SEQ ID NO: 1059 - protein, 17 aa, Artificial Sequence
  Synthetically generated peptide
  VARIANT (5)..(9): Xaa = Any Amino Acid
  misc_feature (12)..(12): Xaa can be any naturally occurring amino acid
CCEYXCCNXPAXCTGCY

SEQ ID NO: 1060 - protein, 18 aa, Artificial Sequence
  Synthetically generated peptide
  VARIANT (5)..(9): Xaa = Any Amino Acid
  misc_feature (12)..(13): Xaa can be any naturally occurring amino acid
CCEYXCCNXPAXXCTGCY

SEQ ID NO: 1061 - protein, 18 aa, Artificial Sequence
  Synthetically generated peptide
  VARIANT (5)..(9): Xaa = Any Amino Acid
  misc_feature (12)..(12): Xaa can be any naturally occurring amino acid
  misc_feature (14)..(14): Xaa can be any naturally occurring amino acid
CCEYXCCNXPAXCXTGCY

SEQ ID NO: 1062 - protein, 18 aa, Artificial Sequence
  Synthetically generated peptide
  VARIANT (5)..(9): Xaa = Any Amino Acid
  misc_feature (12)..(12): Xaa can be any naturally occurring amino acid
  misc_feature (15)..(15): Xaa can be any naturally occurring amino acid
CCEYXCCNXPAXCTXGCY

SEQ ID NO: 1063 - protein, 18 aa, Artificial Sequence
  Synthetically generated peptide
  VARIANT (5)..(9): Xaa = Any Amino Acid
  misc_feature (12)..(12): Xaa can be any naturally occurring amino acid
  misc_feature (16)..(16): Xaa can be any naturally occurring amino acid
CCEYXCCNXPAXCTGXCY

SEQ ID NO: 1064 - protein, 18 aa, Artificial Sequence
  Synthetically generated peptide
  VARIANT (5)..(9): Xaa = Any Amino Acid
  misc_feature (12)..(12): Xaa can be any naturally occurring amino acid
  misc_feature (17)..(17): Xaa can be any naturally occurring amino acid
CCEYXCCNXPAXCTGCXY

SEQ ID NO: 1065 - protein, 17 aa, Artificial Sequence
  Synthetically generated peptide
  VARIANT (5)..(9): Xaa = Any Amino Acid
  misc_feature (13)..(13): Xaa can be any naturally occurring amino acid
CCEYXCCNXPACXTGCY

SEQ ID NO: 1066 - protein, 18 aa, Artificial Sequence
  Synthetically generated peptide
  VARIANT (5)..(9): Xaa = Any Amino Acid
  misc_feature (13)..(14): Xaa can be any naturally occurring amino acid
CCEYXCCNXPACXXTGCY

SEQ ID NO: 1067 - protein, 18 aa, Artificial Sequence
  Synthetically generated peptide
  VARIANT (5)..(9): Xaa = Any Amino Acid
  misc_feature (13)..(13): Xaa can be any naturally occurring amino acid
  misc_feature (15)..(15): Xaa can be any naturally occurring amino acid
CCEYXCCNXPACXTXGCY

SEQ ID NO: 1068 - protein, 18 aa, Artificial Sequence
  Synthetically generated peptide
  VARIANT (5)..(9): Xaa = Any Amino Acid
  misc_feature (13)..(13): Xaa can be any naturally occurring amino acid
  misc_feature (16)..(16): Xaa can be any naturally occurring amino acid
CCEYXCCNXPACXTGXCY

SEQ ID NO: 1069 - protein, 18 aa, Artificial Sequence
  Synthetically generated peptide
  VARIANT (5)..(9): Xaa = Any Amino Acid
  misc_feature (13)..(13): Xaa can be any naturally occurring amino acid
  misc_feature (17)..(17): Xaa can be any naturally occurring amino acid
CCEYXCCNXPACXTGCXY

SEQ ID NO: 1070 - protein, 17 aa, Artificial Sequence
  Synthetically generated peptide
  VARIANT (5)..(9): Xaa = Any Amino Acid
  misc_feature (14)..(14): Xaa can be any naturally occurring amino acid
CCEYXCCNXPACTXGCY

SEQ ID NO: 1071 - protein, 18 aa, Artificial Sequence
  Synthetically generated peptide
  VARIANT (5)..(9): Xaa = Any Amino Acid
  misc_feature (14)..(15): Xaa can be any naturally occurring amino acid
CCEYXCCNXPACTXXGCY

SEQ ID NO: 1072 - protein, 18 aa, Artificial Sequence
  Synthetically generated peptide
  VARIANT (5)..(9): Xaa = Any Amino Acid
  misc_feature (14)..(14): Xaa can be any naturally occurring amino acid
  misc_feature (16)..(16): Xaa can be any naturally occurring amino acid
CCEYXCCNXPACTXGXCY

SEQ ID NO: 1073 - protein, 18 aa, Artificial Sequence
  Synthetically generated peptide
  VARIANT (5)..(9): Xaa = Any Amino Acid
  misc_feature (14)..(14): Xaa can be any naturally occurring amino acid
  misc_feature (17)..(17): Xaa can be any naturally occurring amino acid
CCEYXCCNXPACTXGCXY

SEQ ID NO: 1074 - protein, 17 aa, Artificial Sequence
  Synthetically generated peptide
  VARIANT (5)..(9): Xaa = Any Amino Acid
  misc_feature (15)..(15): Xaa can be any naturally occurring amino acid
CCEYXCCNXPACTGXCY

SEQ ID NO: 1075 - protein, 18 aa, Artificial Sequence
  Synthetically generated peptide
  VARIANT (5)..(9): Xaa = Any Amino Acid
  misc_feature (15)..(16): Xaa can be any naturally occurring amino acid
CCEYXCCNXPACTGXXCY

SEQ ID NO: 1076 - protein, 18 aa, Artificial Sequence
  Synthetically generated peptide
  VARIANT (5)..(9): Xaa = Any Amino Acid
  misc_feature (15)..(15): Xaa can be any naturally occurring amino acid
  misc_feature (17)..(17): Xaa can be any naturally occurring amino acid
CCEYXCCNXPACTGXCXY

SEQ ID NO: 1077 - protein, 17 aa, Artificial Sequence
  Synthetically generated peptide
  VARIANT (5)..(9): Xaa = Any Amino Acid
  misc_feature (16)..(16): Xaa can be any naturally occurring amino acid
CCEYXCCNXPACTGCXY

SEQ ID NO: 1078 - protein, 18 aa, Artificial Sequence
  Synthetically generated peptide
  VARIANT (5)..(9): Xaa = Any Amino Acid
  misc_feature (16)..(17): Xaa can be any naturally occurring amino acid
CCEYXCCNXPACTGCXXY

SEQ ID NO: 1079 - protein, 16 aa, Artificial Sequence
  Synthetically generated peptide
  VARIANT (5)..(10): Xaa = Any Amino Acid
CCEYXCCNPXACTGCY

SEQ ID NO: 1080 - protein, 17 aa, Artificial Sequence
  Synthetically generated peptide
  VARIANT (5)..(10): Xaa = Any Amino Acid
  misc_feature (11)..(11): Xaa can be any naturally occurring amino acid
CCEYXCCNPXXACTGCY

SEQ ID NO: 1081 - protein, 18 aa, Artificial Sequence
  Synthetically generated peptide
  VARIANT (5)..(10): Xaa = Any Amino Acid
  misc_feature (11)..(12): Xaa can be any naturally occurring amino acid
CCEYXCCNPXXXACTGCY

SEQ ID NO: 1082 - protein, 18 aa, Artificial Sequence
  Synthetically generated peptide
  VARIANT (5)..(10): Xaa = Any Amino Acid
  misc_feature (11)..(11): Xaa can be any naturally occurring amino acid
  misc_feature (13)..(13): Xaa can be any naturally occurring amino acid
CCEYXCCNPXXAXCTGCY

SEQ ID NO: 1083 - protein, 18 aa, Artificial Sequence
  Synthetically generated peptide
  VARIANT (5)..(10): Xaa = Any Amino Acid
  misc_feature (11)..(11): Xaa can be any naturally occurring amino acid
  misc_feature (14)..(14): Xaa can be any naturally occurring amino acid
CCEYXCCNPXXACXTGCY

SEQ ID NO: 1084 - protein, 18 aa, Artificial Sequence
  Synthetically generated peptide
  VARIANT (5)..(10): Xaa = Any Amino Acid
  misc_feature (11)..(11): Xaa can be any naturally occurring amino acid
  misc_feature (15)..(15): Xaa can be any naturally occurring amino acid
CCEYXCCNPXXACTXGCY

SEQ ID NO: 1085 - protein, 18 aa, Artificial Sequence
  Synthetically generated peptide
  VARIANT (5)..(10): Xaa = Any Amino Acid
  misc_feature (11)..(11): Xaa can be any naturally occurring amino acid
  misc_feature (16)..(16): Xaa can be any naturally occurring amino acid
CCEYXCCNPXXACTGXCY

SEQ ID NO: 1086 - protein, 18 aa, Artificial Sequence
  Synthetically generated peptide
  VARIANT (5)..(10): Xaa = Any Amino Acid
  misc_feature (11)..(11): Xaa can be any naturally occurring amino acid
  misc_feature (17)..(17): Xaa can be any naturally occurring amino acid
CCEYXCCNPXXACTGCXY

SEQ ID NO: 1087 - protein, 17 aa, Artificial Sequence
  Synthetically generated peptide
  VARIANT (5)..(10): Xaa = Any Amino Acid
  misc_feature (12)..(12): Xaa can be any naturally occurring amino acid
CCEYXCCNPXAXCTGCY

SEQ ID NO: 1088 - protein, 18 aa, Artificial Sequence
  Synthetically generated peptide
  VARIANT (5)..(10): Xaa = Any Amino Acid
  misc_feature (12)..(13): Xaa can be any naturally occurring amino acid
CCEYXCCNPXAXXCTGCY

SEQ ID NO: 1089 - protein, 18 aa, Artificial Sequence
  Synthetically generated peptide
  VARIANT (5)..(10): Xaa = Any Amino Acid
  misc_feature (12)..(12): Xaa can be any naturally occurring amino acid
  misc_feature (14)..(14): Xaa can be any naturally occurring amino acid
CCEYXCCNPXAXCXTGCY

SEQ ID NO: 1090 - protein, 18 aa, Artificial Sequence
  Synthetically generated peptide
  VARIANT (5)..(10): Xaa = Any Amino Acid
  misc_feature (12)..(12): Xaa can be any naturally occurring amino acid
  misc_feature (15)..(15): Xaa can be any naturally occurring amino acid
CCEYXCCNPXAXCTXGCY

SEQ ID NO: 1091 - protein, 18 aa, Artificial Sequence
  Synthetically generated peptide
  VARIANT (5)..(10): Xaa = Any Amino Acid
  misc_feature (12)..(12): Xaa can be any naturally occurring amino acid
  misc_feature (16)..(16): Xaa can be any naturally occurring amino acid
CCEYXCCNPXAXCTGXCY

SEQ ID NO: 1092 - protein, 17 aa, Artificial Sequence
  Synthetically generated peptide
  VARIANT (5)..(10): Xaa = Any Amino Acid
  misc_feature (13)..(13): Xaa can be any naturally occurring amino acid
CCEYXCCNPXACXTGCY

SEQ ID NO: 1093 - protein, 18 aa, Artificial Sequence
  Synthetically generated peptide
  VARIANT (5)..(10): Xaa = Any Amino Acid
  misc_feature (13)..(14): Xaa can be any naturally occurring amino acid
CCEYXCCNPXACXXTGCY

SEQ ID NO: 1094 - protein, 18 aa, Artificial Sequence
  Synthetically generated peptide
  VARIANT (5)..(10): Xaa = Any Amino Acid
  misc_feature (13)..(13): Xaa can be any naturally occurring amino acid
  misc_feature (15)..(15): Xaa can be any naturally occurring amino acid
CCEYXCCNPXACXTXGCY

SEQ ID NO: 1095 - protein, 18 aa, Artificial Sequence
  Synthetically generated peptide
  VARIANT (5)..(10): Xaa = Any Amino Acid
  misc_feature (13)..(13): Xaa can be any naturally occurring amino acid
  misc_feature (16)..(16): Xaa can be any naturally occurring amino acid
CCEYXCCNPXACXTGXCY

SEQ ID NO: 1096 - protein, 18 aa, Artificial Sequence
  Synthetically generated peptide
  VARIANT (5)..(10): Xaa = Any Amino Acid
  misc_feature (13)..(13): Xaa can be any naturally occurring amino acid
  misc_feature (17)..(17): Xaa can be any naturally occurring amino acid
CCEYXCCNPXACXTGCXY

SEQ ID NO: 1097 - protein, 17 aa, Artificial Sequence
  Synthetically generated peptide
  VARIANT (5)..(10): Xaa = Any Amino Acid
  misc_feature (14)..(14): Xaa can be any naturally occurring amino acid
CCEYXCCNPXACTXGCY

SEQ ID NO: 1098 - protein, 18 aa, Artificial Sequence
  Synthetically generated peptide
  VARIANT (5)..(10): Xaa = Any Amino Acid
  misc_feature (14)..(15): Xaa can be any naturally occurring amino acid
CCEYXCCNPXACTXXGCY

SEQ ID NO: 1099 - protein, 18 aa, Artificial Sequence
  Synthetically generated peptide
  VARIANT (5)..(10): Xaa = Any Amino Acid
  misc_feature (14)..(14): Xaa can be any naturally occurring amino acid
  misc_feature (16)..(16): Xaa can be any naturally occurring amino acid
CCEYXCCNPXACTXGXCY

SEQ ID NO: 1100 - protein, 18 aa, Artificial Sequence
  Synthetically generated peptide
  VARIANT (5)..(10): Xaa = Any Amino Acid
  misc_feature (14)..(14): Xaa can be any naturally occurring amino acid
  misc_feature (17)..(17): Xaa can be any naturally occurring amino acid
CCEYXCCNPXACTXGCXY

SEQ ID NO: 1101 - protein, 17 aa, Artificial Sequence
  Synthetically generated peptide
  VARIANT (5)..(10): Xaa = Any Amino Acid
  misc_feature (15)..(15): Xaa can be any naturally occurring amino acid
CCEYXCCNPXACTGXCY

SEQ ID NO: 1102 - protein, 18 aa, Artificial Sequence
  Synthetically generated peptide
  VARIANT (5)..(10): Xaa = Any Amino Acid
  misc_feature (15)..(16): Xaa can be any naturally occurring amino acid
CCEYXCCNPXACTGXXCY

SEQ ID NO: 1103 - protein, 18 aa, Artificial Sequence
  Synthetically generated peptide
  VARIANT (5)..(10): Xaa = Any Amino Acid
  misc_feature (15)..(15): Xaa can be any naturally occurring amino acid
  misc_feature (17)..(17): Xaa can be any naturally occurring amino acid
CCEYXCCNPXACTGXCXY

SEQ ID NO: 1104 - protein, 17 aa, Artificial Sequence
  Synthetically generated peptide
  VARIANT (5)..(10): Xaa = Any Amino Acid
  misc_feature (16)..(16): Xaa can be any naturally occurring amino acid
CCEYXCCNPXACTGCXY

SEQ ID NO: 1105 - protein, 18 aa, Artificial Sequence
  Synthetically generated peptide
  VARIANT (5)..(10): Xaa = Any Amino Acid
  misc_feature (16)..(17): Xaa can be any naturally occurring amino acid
CCEYXCCNPXACTGCXXY

SEQ ID NO: 1106 - protein, 16 aa, Artificial Sequence
  Synthetically generated peptide
  VARIANT (5)..(11): Xaa = Any Amino Acid
CCEYXCCNPAXCTGCY

SEQ ID NO: 1107 - protein, 17 aa, Artificial Sequence
  Synthetically generated peptide
  VARIANT (5)..(11): Xaa = Any Amino Acid
  misc_feature (12)..(12): Xaa can be any naturally occurring amino acid
CCEYXCCNPAXXCTGCY

SEQ ID NO: 1108 - protein, 18 aa, Artificial Sequence
  Synthetically generated peptide
  VARIANT (5)..(11): Xaa = Any Amino Acid
  misc_feature (12)..(13): Xaa can be any naturally occurring amino acid
CCEYXCCNPAXXXCTGCY

SEQ ID NO: 1109 - protein, 18 aa, Artificial Sequence
  Synthetically generated peptide
  VARIANT (5)..(11): Xaa = Any Amino Acid
  misc_feature (12)..(12): Xaa can be any naturally occurring amino acid
  misc_feature (14)..(14): Xaa can be any naturally occurring amino acid
CCEYXCCNPAXXCXTGCY

SEQ ID NO: 1110 - protein, 18 aa, Artificial Sequence
  Synthetically generated peptide
  VARIANT (5)..(11): Xaa = Any Amino Acid
  misc_feature (12)..(12): Xaa can be any naturally occurring amino acid
  misc_feature (15)..(15): Xaa can be any naturally occurring amino acid
CCEYXCCNPAXXCTXGCY

SEQ ID NO: 1111 - protein, 18 aa, Artificial Sequence
  Synthetically generated peptide
  VARIANT (5)..(11): Xaa = Any Amino Acid
  misc_feature (12)..(12): Xaa can be any naturally occurring amino acid
  misc_feature (16)..(16): Xaa can be any naturally occurring amino acid
CCEYXCCNPAXXCTGXCY

SEQ ID NO: 1112 - protein, 18 aa, Artificial Sequence
  Synthetically generated peptide
  VARIANT (5)..(11): Xaa = Any Amino Acid
  misc_feature (12)..(12): Xaa can be any naturally occurring amino acid
  misc_feature (17)..(17): Xaa can be any naturally occurring amino acid
CCEYXCCNPAXXCTGCXY

SEQ ID NO: 1113 - protein, 17 aa, Artificial Sequence
  Synthetically generated peptide
  VARIANT (5)..(11): Xaa = Any Amino Acid
  misc_feature (13)..(13): Xaa can be any naturally occurring amino acid
CCEYXCCNPAXCXTGCY

SEQ ID NO: 1114 - protein, 18 aa, Artificial Sequence
  Synthetically generated peptide
  VARIANT (5)..(11): Xaa = Any Amino Acid
  misc_feature (13)..(14): Xaa can be any naturally occurring amino acid
CCEYXCCNPAXCXXTGCY

SEQ ID NO: 1115 - protein, 18 aa, Artificial Sequence
  Synthetically generated peptide
  VARIANT (5)..(11): Xaa = Any Amino Acid
  misc_feature (13)..(13): Xaa can be any naturally occurring amino acid
  misc_feature (15)..(15): Xaa can be any naturally occurring amino acid
CCEYXCCNPAXCXTXGCY

SEQ ID NO: 1116 - protein, 18 aa, Artificial Sequence
  Synthetically generated peptide
  VARIANT (5)..(11): Xaa = Any Amino Acid
  misc_feature (13)..(13): Xaa can be any naturally occurring amino acid
  misc_feature (16)..(16): Xaa can be any naturally occurring amino acid
CCEYXCCNPAXCXTGXCY

SEQ ID NO: 1117 - protein, 18 aa, Artificial Sequence
  Synthetically generated peptide
  VARIANT (5)..(11): Xaa = Any Amino Acid
  misc_feature (13)..(13): Xaa can be any naturally occurring amino acid
  misc_feature (17)..(17): Xaa can be any naturally occurring amino acid
CCEYXCCNPAXCXTGCXY

SEQ ID NO: 1118 - protein, 17 aa, Artificial Sequence
  Synthetically generated peptide
  VARIANT (5)..(11): Xaa = Any Amino Acid
  misc_feature (14)..(14): Xaa can be any naturally occurring amino acid
CCEYXCCNPAXCTXGCY

SEQ ID NO: 1119 - protein, 18 aa, Artificial Sequence
  Synthetically generated peptide
  VARIANT (5)..(11): Xaa = Any Amino Acid
  misc_feature (14)..(15): Xaa can be any naturally occurring amino acid
CCEYXCCNPAXCTXXGCY

SEQ ID NO: 1120 - protein, 18 aa, Artificial Sequence
  Synthetically generated peptide
  VARIANT (5)..(11): Xaa = Any Amino Acid
  misc_feature (14)..(14): Xaa can be any naturally occurring amino acid
  misc_feature (16)..(16): Xaa can be any naturally occurring amino acid
CCEYXCCNPAXCTXGXCY

SEQ ID NO: 1121 - protein, 18 aa, Artificial Sequence
  Synthetically generated peptide
  VARIANT (5)..(11): Xaa = Any Amino Acid
  misc_feature (14)..(14): Xaa can be any naturally occurring amino acid
  misc_feature (17)..(17): Xaa can be any naturally occurring amino acid
CCEYXCCNPAXCTXGCXY

SEQ ID NO: 1122 - protein, 17 aa, Artificial Sequence
  Synthetically generated peptide
  VARIANT (5)..(11): Xaa = Any Amino Acid
  misc_feature (15)..(15): Xaa can be any naturally occurring amino acid
CCEYXCCNPAXCTGXCY

SEQ ID NO: 1123 - protein, 18 aa, Artificial Sequence
  Synthetically generated peptide
  VARIANT (5)..(11): Xaa = Any Amino Acid
  misc_feature (15)..(16): Xaa can be any naturally occurring amino acid
CCEYXCCNPAXCTGXXCY

SEQ ID NO: 1124 - protein, 18 aa, Artificial Sequence
  Synthetically generated peptide
  VARIANT (5)..(11): Xaa = Any Amino Acid
  misc_feature (15)..(15): Xaa can be any naturally occurring amino acid
  misc_feature (17)..(17): Xaa can be any naturally occurring amino acid
CCEYXCCNPAXCTGXCXY

SEQ ID NO: 1125 - protein, 17 aa, Artificial Sequence
  Synthetically generated peptide
  VARIANT (5)..(11): Xaa = Any Amino Acid
  misc_feature (16)..(16): Xaa can be any naturally occurring amino acid
CCEYXCCNPAXCTGCXY

SEQ ID NO: 1126 - protein, 18 aa, Artificial Sequence
  Synthetically generated peptide
  VARIANT (5)..(11): Xaa = Any Amino Acid
  misc_feature (16)..(17): Xaa can be any naturally occurring amino acid
CCEYXCCNPAXCTGCXXY

SEQ ID NO: 1127 - protein, 16 aa, Artificial Sequence
  Synthetically generated peptide
  VARIANT (5)..(12): Xaa = Any Amino Acid
CCEYXCCNPACXTGCY

SEQ ID NO: 1128 - protein, 17 aa, Artificial Sequence
  Synthetically generated peptide
  VARIANT (5)..(12): Xaa = Any Amino Acid
  misc_feature (13)..(13): Xaa can be any naturally occurring amino acid
CCEYXCCNPACXXTGCY

SEQ ID NO: 1129 - protein, 18 aa, Artificial Sequence
  Synthetically generated peptide
  VARIANT (5)..(12): Xaa = Any Amino Acid
  misc_feature (13)..(14): Xaa can be any naturally occurring amino acid
CCEYXCCNPACXXXTGCY

SEQ ID NO: 1130 - protein, 18 aa, Artificial Sequence
  Synthetically generated peptide
  VARIANT (5)..(12): Xaa = Any Amino Acid
  misc_feature (13)..(13): Xaa can be any naturally occurring amino acid
  misc_feature (15)..(15): Xaa can be any naturally occurring amino acid
CCEYXCCNPACXXTXGCY

SEQ ID NO: 1131 - protein, 18 aa, Artificial Sequence
  Synthetically generated peptide
  VARIANT (5)..(12): Xaa = Any Amino Acid
  misc_feature (13)..(13): Xaa can be any naturally occurring amino acid
  misc_feature (16)..(16): Xaa can be any naturally occurring amino acid
CCEYXCCNPACXXTGXCY

SEQ ID NO: 1132 - protein, 18 aa, Artificial Sequence
  Synthetically generated peptide
  VARIANT (5)..(12): Xaa = Any Amino Acid
  misc_feature (13)..(13): Xaa can be any naturally occurring amino acid
  misc_feature (17)..(17): Xaa can be any naturally occurring amino acid
CCEYXCCNPACXXTGCXY

SEQ ID NO: 1133 - protein, 17 aa, Artificial Sequence
  Synthetically generated peptide
  VARIANT (5)..(12): Xaa = Any Amino Acid
  misc_feature (14)..(14): Xaa can be any naturally occurring amino acid
CCEYXCCNPACXTXGCY

SEQ ID NO: 1134 - protein, 18 aa, Artificial Sequence
  Synthetically generated peptide
  VARIANT (5)..(12): Xaa = Any Amino Acid
  misc_feature (14)..(15): Xaa can be any naturally occurring amino acid
CCEYXCCNPACXTXXGCY

SEQ ID NO: 1135 - protein, 18 aa, Artificial Sequence
  Synthetically generated peptide
  VARIANT (5)..(12): Xaa = Any Amino Acid
  misc_feature (14)..(14): Xaa can be any naturally occurring amino acid
  misc_feature (16)..(16): Xaa can be any naturally occurring amino acid
CCEYXCCNPACXTXGXCY

SEQ ID NO: 1136 - protein, 18 aa, Artificial Sequence
  Synthetically generated peptide
  VARIANT (5)..(12): Xaa = Any Amino Acid
  misc_feature (14)..(14): Xaa can be any naturally occurring amino acid
  misc_feature (17)..(17): Xaa can be any naturally occurring amino acid
CCEYXCCNPACXTXGCXY

SEQ ID NO: 1137 - protein, 17 aa, Artificial Sequence
  Synthetically generated peptide
  VARIANT (5)..(12): Xaa = Any Amino Acid
  misc_feature (15)..(15): Xaa can be any naturally occurring amino acid
CCEYXCCNPACXTGXCY

SEQ ID NO: 1138 - protein, 18 aa, Artificial Sequence
  Synthetically generated peptide
  VARIANT (5)..(12): Xaa = Any Amino Acid
  misc_feature (15)..(16): Xaa can be any naturally occurring amino acid
CCEYXCCNPACXTGXXCY

SEQ ID NO: 1139 - protein, 18 aa, Artificial Sequence
  Synthetically generated peptide
  VARIANT (5)..(12): Xaa = Any Amino Acid
  misc_feature (15)..(15): Xaa can be any naturally occurring amino acid
  misc_feature (17)..(17): Xaa can be any naturally occurring amino acid
CCEYXCCNPACXTGXCXY

SEQ ID NO: 1140 - protein, 17 aa, Artificial Sequence
  Synthetically generated peptide
  VARIANT (5)..(12): Xaa = Any Amino Acid
  misc_feature (16)..(16): Xaa can be any naturally occurring amino acid
CCEYXCCNPACXTGCXY

SEQ ID NO: 1141 - protein, 18 aa, Artificial Sequence
  Synthetically generated peptide
  VARIANT (5)..(12): Xaa = Any Amino Acid
  misc_feature (16)..(17): Xaa can be any naturally occurring amino acid
CCEYXCCNPACXTGCXXY

SEQ ID NO: 1142 - protein, 16 aa, Artificial Sequence
  Synthetically generated peptide
  VARIANT (5)..(13): Xaa = Any Amino Acid
CCEYXCCNPACTXGCY

SEQ ID NO: 1143 - protein, 17 aa, Artificial Sequence
  Synthetically generated peptide
  VARIANT (5)..(13): Xaa = Any Amino Acid
  misc_feature (14)..(14): Xaa can be any naturally occurring amino acid
CCEYXCCNPACTXXGCY

SEQ ID NO: 1144 - protein, 18 aa, Artificial Sequence
  Synthetically generated peptide
  VARIANT (5)..(13): Xaa = Any Amino Acid
  misc_feature (14)..(15): Xaa can be any naturally occurring amino acid
CCEYXCCNPACTXXXGCY

SEQ ID NO: 1145 - protein, 18 aa, Artificial Sequence
  Synthetically generated peptide
  VARIANT (5)..(13): Xaa = Any Amino Acid
  misc_feature (14)..(14): Xaa can be any naturally occurring amino acid
  misc_feature (16)..(16): Xaa can be any naturally occurring amino acid
CCEYXCCNPACTXXGXCY

SEQ ID NO: 1146 - protein, 18 aa, Artificial Sequence
  Synthetically generated peptide
  VARIANT (5)..(13): Xaa = Any Amino Acid
  misc_feature (14)..(14): Xaa can be any naturally occurring amino acid
  misc_feature (17)..(17): Xaa can be any naturally occurring amino acid
CCEYXCCNPACTXXGCXY

SEQ ID NO: 1147 - protein, 17 aa, Artificial Sequence
  Synthetically generated peptide
  VARIANT (5)..(13): Xaa = Any Amino Acid
  misc_feature (15)..(15): Xaa can be any naturally occurring amino acid
CCEYXCCNPACTXGXCY

SEQ ID NO: 1148 - protein, 18 aa, Artificial Sequence
  Synthetically generated peptide
  VARIANT (5)..(13): Xaa = Any Amino Acid
  misc_feature (15)..(16): Xaa can be any naturally occurring amino acid
CCEYXCCNPACTXGXXCY

SEQ ID NO: 1149 - protein, 18 aa, Artificial Sequence
  Synthetically generated peptide
  VARIANT (5)..(13): Xaa = Any Amino Acid
  misc_feature (15)..(15): Xaa can be any naturally occurring amino acid
  misc_feature (17)..(17): Xaa can be any naturally occurring amino acid
CCEYXCCNPACTXGXCXY

SEQ ID NO: 1150 - protein, 17 aa, Artificial Sequence
  Synthetically generated peptide
  VARIANT (5)..(13): Xaa = Any Amino Acid
  misc_feature (16)..(16): Xaa can be any naturally occurring amino acid
CCEYXCCNPACTXGCXY

SEQ ID NO: 1151 - protein, 18 aa, Artificial Sequence
  Synthetically generated peptide
  VARIANT (5)..(13): Xaa = Any Amino Acid
  misc_feature (16)..(17): Xaa can be any naturally occurring amino acid
CCEYXCCNPACTXGCXXY

SEQ ID NO: 1152 - protein, 16 aa, Artificial Sequence
  Synthetically generated peptide
  VARIANT (5)..(14): Xaa = Any Amino Acid
CCEYXCCNPACTGXCY

SEQ ID NO: 1153 - protein, 17 aa, Artificial Sequence
  Synthetically generated peptide
  VARIANT (5)..(14): Xaa = Any Amino Acid
  misc_feature (15)..(15): Xaa can be any naturally occurring amino acid
CCEYXCCNPACTGXXCY

SEQ ID NO: 1154 - protein, 18 aa, Artificial Sequence
  Synthetically generated peptide
  VARIANT (5)..(14): Xaa = Any Amino Acid
  misc_feature (15)..(16): Xaa can be any naturally occurring amino acid
CCEYXCCNPACTGXXXCY

SEQ ID NO: 1155 - protein, 18 aa, Artificial Sequence
  Synthetically generated peptide
  VARIANT (5)..(14): Xaa = Any Amino Acid
  misc_feature (15)..(15): Xaa can be any naturally occurring amino acid
  misc_feature (17)..(17): Xaa can be any naturally occurring amino acid
CCEYXCCNPACTGXXCXY

SEQ ID NO: 1156 - protein, 17 aa, Artificial Sequence
  Synthetically generated peptide
  VARIANT (5)..(14): Xaa = Any Amino Acid
  misc_feature (16)..(16): Xaa can be any naturally occurring amino acid
CCEYXCCNPACTGXCXY

SEQ ID NO: 1157 - protein, 18 aa, Artificial Sequence
  Synthetically generated peptide
  VARIANT (5)..(14): Xaa = Any Amino Acid
  misc_feature (16)..(17): Xaa can be any naturally occurring amino acid
CCEYXCCNPACTGXCXXY

SEQ ID NO: 1158 - protein, 16 aa, Artificial Sequence
  Synthetically generated peptide
  VARIANT (5)..(15): Xaa = Any Amino Acid
CCEYXCCNPACTGCXY

SEQ ID NO: 1159 - protein, 17 aa, Artificial Sequence
  Synthetically generated peptide
  VARIANT (5)..(15): Xaa = Any Amino Acid
  misc_feature (16)..(16): Xaa can be any naturally occurring amino acid
CCEYXCCNPACTGCXXY

SEQ ID NO: 1160 - protein, 18 aa, Artificial Sequence
  Synthetically generated peptide
  VARIANT (5)..(15): Xaa = Any Amino Acid
  misc_feature (16)..(17): Xaa can be any naturally occurring amino acid
CCEYXCCNPACTGCXXXY

SEQ ID NO: 1161 - protein, 15 aa, Artificial Sequence
  Synthetically generated peptide
  VARIANT (7)..(7): Xaa = Any Amino Acid
CCEYCCXNPACTGCY

SEQ ID NO: 1162 - protein, 16 aa, Artificial Sequence
  Synthetically generated peptide
  VARIANT (7)..(8): Xaa = Any Amino Acid
CCEYCCXXNPACTGCY

SEQ ID NO: 1163 - protein, 17 aa, Artificial Sequence
  Synthetically generated peptide
  VARIANT (7)..(8): Xaa = Any Amino Acid
  misc_feature (9)..(9): Xaa can be any naturally occurring amino acid
CCEYCCXXXNPACTGCY

SEQ ID NO: 1164 - protein, 18 aa, Artificial Sequence
  Synthetically generated peptide
  VARIANT (7)..(8): Xaa = Any Amino Acid
  misc_feature (9)..(10): Xaa can be any naturally occurring amino acid
CCEYCCXXXXNPACTGCY

SEQ ID NO: 1165 - protein, 18 aa, Artificial Sequence
  Synthetically generated peptide
  VARIANT (7)..(8): Xaa = Any Amino Acid
  misc_feature (9)..(9): Xaa can be any naturally occurring amino acid
  misc_feature (11)..(11): Xaa can be any naturally occurring amino acid
CCEYCCXXXNXPACTGCY

SEQ ID NO: 1166 - protein, 18 aa, Artificial Sequence
  Synthetically generated peptide
  VARIANT (7)..(8): Xaa = Any Amino Acid
  misc_feature (9)..(9): Xaa can be any naturally occurring amino acid
  misc_feature (12)..(12): Xaa can be any naturally occurring amino acid
CCEYCCXXXNPXACTGCY

SEQ ID NO: 1167 - protein, 18 aa, Artificial Sequence
  Synthetically generated peptide
  VARIANT (7)..(8): Xaa = Any Amino Acid
  misc_feature (9)..(9): Xaa can be any naturally occurring amino acid
  misc_feature (13)..(13): Xaa can be any naturally occurring amino acid
CCEYCCXXXNPAXCTGCY

SEQ ID NO: 1168 - protein, 18 aa, Artificial Sequence
  Synthetically generated peptide
  VARIANT (7)..(8): Xaa = Any Amino Acid
  misc_feature (9)..(9): Xaa can be any naturally occurring amino acid
  misc_feature (14)..(14): Xaa can be any naturally occurring amino acid
CCEYCCXXXNPACXTGCY

SEQ ID NO: 1169 - protein, 18 aa, Artificial Sequence
  Synthetically generated peptide
  VARIANT (7)..(8): Xaa = Any Amino Acid
  misc_feature (9)..(9): Xaa can be any naturally occurring amino acid
  misc_feature (15)..(15): Xaa can be any naturally occurring amino acid
CCEYCCXXXNPACTXGCY

SEQ ID NO: 1170 - protein, 18 aa, Artificial Sequence
  Synthetically generated peptide
  VARIANT (7)..(8): Xaa = Any Amino Acid
  misc_feature (9)..(9): Xaa can be any naturally occurring amino acid
  misc_feature (16)..(16): Xaa can be any naturally occurring amino acid
CCEYCCXXXNPACTGXCY

SEQ ID NO: 1171 - protein, 18 aa, Artificial Sequence
  Synthetically generated peptide
  VARIANT (7)..(8): Xaa = Any Amino Acid
  misc_feature (9)..(9): Xaa can be any naturally occurring amino acid
  misc_feature (17)..(17): Xaa can be any naturally occurring amino acid
CCEYCCXXXNPACTGCXY

SEQ ID NO: 1172 - protein, 17 aa, Artificial Sequence
  Synthetically generated peptide
  VARIANT (7)..(8): Xaa = Any Amino Acid
  misc_feature (10)..(10): Xaa can be any naturally occurring amino acid
CCEYCCXXNXPACTGCY

SEQ ID NO: 1173 - protein, 18 aa, Artificial Sequence
  Synthetically generated peptide
  VARIANT (7)..(8): Xaa = Any Amino Acid
  misc_feature (10)..(11): Xaa can be any naturally occurring amino acid
CCEYCCXXNXXPACTGCY

SEQ ID NO: 1174 - protein, 18 aa, Artificial Sequence
  Synthetically generated peptide
  VARIANT (7)..(8): Xaa = Any Amino Acid
  misc_feature (10)..(10): Xaa can be any naturally occurring amino acid
  misc_feature (12)..(12): Xaa can be any naturally occurring amino acid
CCEYCCXXNXPXACTGCY

SEQ ID NO: 1175 - protein, 18 aa, Artificial Sequence
  Synthetically generated peptide
  VARIANT (7)..(8): Xaa = Any Amino Acid
  misc_feature (10)..(10): Xaa can be any naturally occurring amino acid
  misc_feature (13)..(13): Xaa can be any naturally occurring amino acid
CCEYCCXXNXPAXCTGCY

SEQ ID NO: 1176 - protein, 18 aa, Artificial Sequence
  Synthetically generated peptide
  VARIANT (7)..(8): Xaa = Any Amino Acid
  misc_feature (10)..(10): Xaa can be any naturally occurring amino acid
  misc_feature (14)..(14): Xaa can be any naturally occurring amino acid
CCEYCCXXNXPACXTGCY

SEQ ID NO: 1177 - protein, 18 aa, Artificial Sequence
  Synthetically generated peptide
  VARIANT (7)..(8): Xaa = Any Amino Acid
  misc_feature (10)..(10): Xaa can be any naturally occurring amino acid
  misc_feature (15)..(15): Xaa can be any naturally occurring amino acid
CCEYCCXXNXPACTXGCY

SEQ ID NO: 1178 - protein, 18 aa, Artificial Sequence
  Synthetically generated peptide
  VARIANT (7)..(8): Xaa = Any Amino Acid
  misc_feature (10)..(10): Xaa can be any naturally occurring amino acid
  misc_feature (16)..(16): Xaa can be any naturally occurring amino acid
CCEYCCXXNXPACTGXCY

SEQ ID NO: 1179 - protein, 18 aa, Artificial Sequence
  Synthetically generated peptide
  VARIANT (7)..(8): Xaa = Any Amino Acid
  misc_feature (10)..(10): Xaa can be any naturally occurring amino acid
  misc_feature (17)..(17): Xaa can be any naturally occurring amino acid
CCEYCCXXNXPACTGCXY

SEQ ID NO: 1180 - protein, 17 aa, Artificial Sequence
  Synthetically generated peptide
  VARIANT (7)..(8): Xaa = Any Amino Acid
  misc_feature (11)..(11): Xaa can be any naturally occurring amino acid
CCEYCCXXNPXACTGCY

SEQ ID NO: 1181 - protein, 18 aa, Artificial Sequence
  Synthetically generated peptide
  VARIANT (7)..(8): Xaa = Any Amino Acid
  misc_feature (11)..(12): Xaa can be any naturally occurring amino acid
CCEYCCXXNPXXACTGCY

SEQ ID NO: 1182 - protein, 18 aa, Artificial Sequence
  Synthetically generated peptide
  VARIANT (7)..(8): Xaa = Any Amino Acid
  misc_feature (11)..(11): Xaa can be any naturally occurring amino acid
  misc_feature (13)..(13): Xaa can be any naturally occurring amino acid
CCEYCCXXNPXAXCTGCY

SEQ ID NO: 1183 - protein, 18 aa, Artificial Sequence
  Synthetically generated peptide
  VARIANT (7)..(8): Xaa = Any Amino Acid
  misc_feature (11)..(11): Xaa can be any naturally occurring amino acid
  misc_feature (14)..(14): Xaa can be any naturally occurring amino acid
CCEYCCXXNPXACXTGCY

SEQ ID NO: 1184 - protein, 18 aa, Artificial Sequence
  Synthetically generated peptide
  VARIANT (7)..(8): Xaa = Any Amino Acid
  misc_feature (11)..(11): Xaa can be any naturally occurring amino acid
  misc_feature (15)..(15): Xaa can be any naturally occurring amino acid
CCEYCCXXNPXACTXGCY

SEQ ID NO: 1185 - protein, 18 aa, Artificial Sequence
  Synthetically generated peptide
  VARIANT (7)..(8): Xaa = Any Amino Acid
  misc_feature (11)..(11): Xaa can be any naturally occurring amino acid
  misc_feature (16)..(16): Xaa can be any naturally occurring amino acid
CCEYCCXXNPXACTGXCY

SEQ ID NO: 1186 - protein, 18 aa, Artificial Sequence
  Synthetically generated peptide
  VARIANT (7)..(8): Xaa = Any Amino Acid
  misc_feature (11)..(11): Xaa can be any naturally occurring amino acid
  misc_feature (17)..(17): Xaa can be any naturally occurring amino acid
CCEYCCXXNPXACTGCXY

SEQ ID NO: 1187 - protein, 17 aa, Artificial Sequence
  Synthetically generated peptide
  VARIANT (7)..(8): Xaa = Any Amino Acid
  misc_feature (12)..(12): Xaa can be any naturally occurring amino acid
CCEYCCXXNPAXCTGCY

SEQ ID NO: 1188 - protein, 18 aa, Artificial Sequence
  Synthetically generated peptide
  VARIANT (7)..(8): Xaa = Any Amino Acid
  misc_feature (12)..(13): Xaa can be any naturally occurring amino acid
CCEYCCXXNPAXXCTGCY

SEQ ID NO: 1189 - protein, 18 aa, Artificial Sequence
  Synthetically generated peptide
  VARIANT (7)..(8): Xaa = Any Amino Acid
  misc_feature (12)..(12): Xaa can be any naturally occurring amino acid
  misc_feature (14)..(14): Xaa can be any naturally occurring amino acid
CCEYCCXXNPAXCXTGCY

SEQ ID NO: 1190 - protein, 18 aa, Artificial Sequence
  Synthetically generated peptide
  VARIANT (7)..(8): Xaa = Any Amino Acid
  misc_feature (12)..(12): Xaa can be any naturally occurring amino acid
  misc_feature (15)..(15): Xaa can be any naturally occurring amino acid
CCEYCCXXNPAXCTXGCY

SEQ ID NO: 1191 - protein, 18 aa, Artificial Sequence
  Synthetically generated peptide
  VARIANT (7)..(8): Xaa = Any Amino Acid
  misc_feature (12)..(12): Xaa can be any naturally occurring amino acid
  misc_feature (16)..(16): Xaa can be any naturally occurring amino acid
CCEYCCXXNPAXCTGXCY

SEQ ID NO: 1192 - protein, 18 aa, Artificial Sequence
  Synthetically generated peptide
  VARIANT (7)..(8): Xaa = Any Amino Acid
  misc_feature (12)..(12): Xaa can be any naturally occurring amino acid
  misc_feature (17)..(17): Xaa can be any naturally occurring amino acid
CCEYCCXXNPAXCTGCXY

SEQ ID NO: 1193 - protein, 17 aa, Artificial Sequence
  Synthetically generated peptide
  VARIANT (7)..(8): Xaa = Any Amino Acid
  misc_feature (13)..(13): Xaa can be any naturally occurring amino acid
CCEYCCXXNPACXTGCY

SEQ ID NO: 1194 - protein, 18 aa, Artificial Sequence
  Synthetically generated peptide
  VARIANT (7)..(8): Xaa = Any Amino Acid
  misc_feature (13)..(14): Xaa can be any naturally occurring amino acid
CCEYCCXXNPACXXTGCY

SEQ ID NO: 1195 - protein, 18 aa, Artificial Sequence
  Synthetically generated peptide
  VARIANT (7)..(8): Xaa = Any Amino Acid
  misc_feature (13)..(13): Xaa can be any naturally occurring amino acid
  misc_feature (15)..(15): Xaa can be any naturally occurring amino acid
CCEYCCXXNPACXTXGCY

SEQ ID NO: 1196 - protein, 18 aa, Artificial Sequence
  Synthetically generated peptide
  VARIANT (7)..(8): Xaa = Any Amino Acid
  misc_feature (13)..(13): Xaa can be any naturally occurring amino acid
  misc_feature (16)..(16): Xaa can be any naturally occurring amino acid
CCEYCCXXNPACXTGXCY

SEQ ID NO: 1197 - protein, 18 aa, Artificial Sequence
  Synthetically generated peptide
  VARIANT (7)..(8): Xaa = Any Amino Acid
  misc_feature (13)..(13): Xaa can be any naturally occurring amino acid
  misc_feature (17)..(17): Xaa can be any naturally occurring amino acid
CCEYCCXXNPACXTGCXY

SEQ ID NO: 1198 - protein, 17 aa, Artificial Sequence
  Synthetically generated peptide
  VARIANT (7)..(8): Xaa = Any Amino Acid
  misc_feature (14)..(14): Xaa can be any naturally occurring amino acid
CCEYCCXXNPACTXGCY

SEQ ID NO: 1199 - protein, 18 aa, Artificial Sequence
  Synthetically generated peptide
  VARIANT (7)..(8): Xaa = Any Amino Acid
  misc_feature (14)..(15): Xaa can be any naturally occurring amino acid
CCEYCCXXNPACTXXGCY

SEQ ID NO: 1200 - protein, 18 aa, Artificial Sequence
  Synthetically generated peptide
  VARIANT (7)..(8): Xaa = Any Amino Acid
  misc_feature (14)..(14): Xaa can be any naturally occurring amino acid
  misc_feature (16)..(16): Xaa can be any naturally occurring amino acid
CCEYCCXXNPACTXGXCY

SEQ ID NO: 1201 - protein, 18 aa, Artificial Sequence
  Synthetically generated peptide
  VARIANT (7)..(8): Xaa = Any Amino Acid
  misc_feature (14)..(14): Xaa can be any naturally occurring amino acid
  misc_feature (17)..(17): Xaa can be any naturally occurring amino acid
CCEYCCXXNPACTXGCXY

SEQ ID NO: 1202 - protein, 17 aa, Artificial Sequence
  Synthetically generated peptide
  VARIANT (7)..(8): Xaa = Any Amino Acid
  misc_feature (15)..(15): Xaa can be any naturally occurring amino acid
CCEYCCXXNPACTGXCY

SEQ ID NO: 1203 - protein, 18 aa, Artificial Sequence
  Synthetically generated peptide
  VARIANT (7)..(8): Xaa = Any Amino Acid
  misc_feature (15)..(16): Xaa can be any naturally occurring amino acid
CCEYCCXXNPACTGXXCY

SEQ ID NO: 1204 - protein, 18 aa, Artificial Sequence
  Synthetically generated peptide
  VARIANT (7)..(8): Xaa = Any Amino Acid
  misc_feature (15)..(15): Xaa can be any naturally occurring amino acid
  misc_feature (17)..(17): Xaa can be any naturally occurring amino acid
CCEYCCXXNPACTGXCXY

SEQ ID NO: 1205 - protein, 17 aa, Artificial Sequence
  Synthetically generated peptide
  VARIANT (7)..(8): Xaa = Any Amino Acid
  misc_feature (16)..(16): Xaa can be any naturally occurring amino acid
CCEYCCXXNPACTGCXY

SEQ ID NO: 1206 - protein, 18 aa, Artificial Sequence
  Synthetically generated peptide
  VARIANT (7)..(8): Xaa = Any Amino Acid
  misc_feature (16)..(17): Xaa can be any naturally occurring amino acid
CCEYCCXXNPACTGCXXY

SEQ ID NO: 1207 - protein, 16 aa, Artificial Sequence
  Synthetically generated peptide
  VARIANT (7)..(9): Xaa = Any Amino Acid
CCEYCCXNXPACTGCY

SEQ ID NO: 1208 - protein, 17 aa, Artificial Sequence
  Synthetically generated peptide
  VARIANT (7)..(9): Xaa = Any Amino Acid
  misc_feature (10)..(10): Xaa can be any naturally occurring amino acid
CCEYCCXNXXPACTGCY

SEQ ID NO: 1209 - protein, 18 aa, Artificial Sequence
  Synthetically generated peptide
  VARIANT (7)..(9): Xaa = Any Amino Acid
  misc_feature (10)..(11): Xaa can be any naturally occurring amino acid
CCEYCCXNXXXPACTGCY

SEQ ID NO: 1210 - protein, 18 aa, Artificial Sequence
  Synthetically generated peptide
  VARIANT (7)..(9): Xaa = Any Amino Acid
  misc_feature (10)..(10): Xaa can be any naturally occurring amino acid
  misc_feature (12)..(12): Xaa can be any naturally occurring amino acid
CCEYCCXNXXPXACTGCY

SEQ ID NO: 1211 - protein, 18 aa, Artificial Sequence
  Synthetically generated peptide
  VARIANT (7)..(9): Xaa = Any Amino Acid
  misc_feature (10)..(10): Xaa can be any naturally occurring amino acid
  misc_feature (13)..(13): Xaa can be any naturally occurring amino acid
CCEYCCXNXXPAXCTGCY

SEQ ID NO: 1212 - protein, 18 aa, Artificial Sequence
  Synthetically generated peptide
  VARIANT (7)..(9): Xaa = Any Amino Acid
  misc_feature (10)..(10): Xaa can be any naturally occurring amino acid
  misc_feature (14)..(14): Xaa can be any naturally occurring amino acid
CCEYCCXNXXPACXTGCY

SEQ ID NO: 1213 - protein, 18 aa, Artificial Sequence
  Synthetically generated peptide
  VARIANT (7)..(9): Xaa = Any Amino Acid
  misc_feature (10)..(10): Xaa can be any naturally occurring amino acid
  misc_feature (15)..(15): Xaa can be any naturally occurring amino acid
CCEYCCXNXXPACTXGCY

SEQ ID NO: 1214 - protein, 18 aa, Artificial Sequence
  Synthetically generated peptide
  VARIANT (7)..(9): Xaa = Any Amino Acid
  misc_feature (10)..(10): Xaa can be any naturally occurring amino acid
  misc_feature (16)..(16): Xaa can be any naturally occurring amino acid
CCEYCCXNXXPACTGXCY

SEQ ID NO: 1215 - protein, 18 aa, Artificial Sequence
  Synthetically generated peptide
  VARIANT (7)..(9): Xaa = Any Amino Acid
  misc_feature (10)..(10): Xaa can be any naturally occurring amino acid
  misc_feature (17)..(17): Xaa can be any naturally occurring amino acid
CCEYCCXNXXPACTGCXY

SEQ ID NO: 1216 - protein, 17 aa, Artificial Sequence
  Synthetically generated peptide
  VARIANT (7)..(9): Xaa = Any Amino Acid
  misc_feature (11)..(11): Xaa can be any naturally occurring amino acid
CCEYCCXNXPXACTGCY

SEQ ID NO: 1217 - protein, 18 aa, Artificial Sequence
  Synthetically generated peptide
  VARIANT (7)..(9): Xaa = Any Amino Acid
  misc_feature (11)..(12): Xaa can be any naturally occurring amino acid
CCEYCCXNXPXXACTGCY

SEQ ID NO: 1218 - protein, 18 aa, Artificial Sequence
  Synthetically generated peptide
  VARIANT (7)..(9): Xaa = Any Amino Acid
  misc_feature (11)..(11): Xaa can be any naturally occurring amino acid
  misc_feature (13)..(13): Xaa can be any naturally occurring amino acid
CCEYCCXNXPXAXCTGCY

SEQ ID NO: 1219 - protein, 18 aa, Artificial Sequence
  Synthetically generated peptide
  VARIANT (7)..(9): Xaa = Any Amino Acid
  misc_feature (11)..(11): Xaa can be any naturally occurring amino acid
  misc_feature (14)..(14): Xaa can be any naturally occurring amino acid
CCEYCCXNXPXACXTGCY

SEQ ID NO: 1220 - protein, 18 aa, Artificial Sequence
  Synthetically generated peptide
  VARIANT (7)..(9): Xaa = Any Amino Acid
  misc_feature (11)..(11): Xaa can be any naturally occurring amino acid
  misc_feature (15)..(15): Xaa can be any naturally occurring amino acid
CCEYCCXNXPXACTXGCY

SEQ ID NO: 1221 - protein, 18 aa, Artificial Sequence
  Synthetically generated peptide
  VARIANT (7)..(9): Xaa = Any Amino Acid
  misc_feature (11)..(11): Xaa can be any naturally occurring amino acid
  misc_feature (16)..(16): Xaa can be any naturally occurring amino acid
CCEYCCXNXPXACTGXCY

SEQ ID NO: 1222 - protein, 18 aa, Artificial Sequence
  Synthetically generated peptide
  VARIANT (7)..(9): Xaa = Any Amino Acid
  misc_feature (11)..(11): Xaa can be any naturally occurring amino acid
  misc_feature (17)..(17): Xaa can be any naturally occurring amino acid
CCEYCCXNXPXACTGCXY

SEQ ID NO: 1223 - protein, 17 aa, Artificial Sequence
  Synthetically generated peptide
  VARIANT (7)..(9): Xaa = Any Amino Acid
  misc_feature (12)..(12): Xaa can be any naturally occurring amino acid
CCEYCCXNXPAXCTGCY

SEQ ID NO: 1224 - protein, 18 aa, Artificial Sequence
  Synthetically generated peptide
  VARIANT (7)..(9): Xaa = Any Amino Acid
  misc_feature (12)..(13): Xaa can be any naturally occurring amino acid
CCEYCCXNXPAXXCTGCY

SEQ ID NO: 1225 - protein, 18 aa, Artificial Sequence
  Synthetically generated peptide
  VARIANT (7)..(9): Xaa = Any Amino Acid
  misc_feature (12)..(12): Xaa can be any naturally occurring amino acid
  misc_feature (14)..(14): Xaa can be any naturally occurring amino acid
CCEYCCXNXPAXCXTGCY

SEQ ID NO: 1226 - protein, 18 aa, Artificial Sequence
  Synthetically generated peptide
  VARIANT (7)..(9): Xaa = Any Amino Acid
  misc_feature (12)..(12): Xaa can be any naturally occurring amino acid
  misc_feature (15)..(15): Xaa can be any naturally occurring amino acid
CCEYCCXNXPAXCTXGCY

SEQ ID NO: 1227 - protein, 18 aa, Artificial Sequence
  Synthetically generated peptide
  VARIANT (7)..(9): Xaa = Any Amino Acid
  misc_feature (12)..(12): Xaa can be any naturally occurring amino acid
  misc_feature (16)..(16): Xaa can be any naturally occurring amino acid
CCEYCCXNXPAXCTGXCY

SEQ ID NO: 1228 - protein, 18 aa, Artificial Sequence
  Synthetically generated peptide
  VARIANT (7)..(9): Xaa = Any Amino Acid
  misc_feature (12)..(12): Xaa can be any naturally occurring amino acid
  misc_feature (17)..(17): Xaa can be any naturally occurring amino acid
CCEYCCXNXPAXCTGCXY

SEQ ID NO: 1229 - protein, 17 aa, Artificial Sequence
  Synthetically generated peptide
  VARIANT (7)..(9): Xaa = Any Amino Acid
  misc_feature (13)..(13): Xaa can be any naturally occurring amino acid
CCEYCCXNXPACXTGCY

SEQ ID NO: 1230 - protein, 18 aa, Artificial Sequence
  Synthetically generated peptide
  VARIANT (7)..(9): Xaa = Any Amino Acid
  misc_feature (13)..(14): Xaa can be any naturally occurring amino acid
CCEYCCXNXPACXXTGCY

SEQ ID NO: 1231 - protein, 18 aa, Artificial Sequence
  Synthetically generated peptide
  VARIANT (7)..(9): Xaa = Any Amino Acid
  misc_feature (13)..(13): Xaa can be any naturally occurring amino acid
  misc_feature (15)..(15): Xaa can be any naturally occurring amino acid
CCEYCCXNXPACXTXGCY

SEQ ID NO: 1232 - protein, 18 aa, Artificial Sequence
  Synthetically generated peptide
  VARIANT (7)..(9): Xaa = Any Amino Acid
  misc_feature (13)..(13): Xaa can be any naturally occurring amino acid
  misc_feature (16)..(16): Xaa can be any naturally occurring amino acid
CCEYCCXNXPACXTGXCY

SEQ ID NO: 1233 - protein, 18 aa, Artificial Sequence
  Synthetically generated peptide
  VARIANT (7)..(9): Xaa = Any Amino Acid
  misc_feature (13)..(13): Xaa can be any naturally occurring amino acid
  misc_feature (17)..(17): Xaa can be any naturally occurring amino acid
CCEYCCXNXPACXTGCXY

SEQ ID NO: 1234 - protein, 17 aa, Artificial Sequence
  Synthetically generated peptide
  VARIANT (7)..(9): Xaa = Any Amino Acid
  misc_feature (14)..(14): Xaa can be any naturally occurring amino acid
CCEYCCXNXPACTXGCY

SEQ ID NO: 1235 - protein, 18 aa, Artificial Sequence
  Synthetically generated peptide
  VARIANT (7)..(9): Xaa = Any Amino Acid
  misc_feature (14)..(15): Xaa can be any naturally occurring amino acid
CCEYCCXNXPACTXXGCY

SEQ ID NO: 1236 - protein, 18 aa, Artificial Sequence
  Synthetically generated peptide
  VARIANT (7)..(9): Xaa = Any Amino Acid
  misc_feature (14)..(14): Xaa can be any naturally occurring amino acid
  misc_feature (16)..(16): Xaa can be any naturally occurring amino acid
CCEYCCXNXPACTXGXCY

SEQ ID NO: 1237 - protein, 18 aa, Artificial Sequence
  Synthetically generated peptide
  VARIANT (7)..(9): Xaa = Any Amino Acid
  misc_feature (14)..(14): Xaa can be any naturally occurring amino acid
  misc_feature (17)..(17): Xaa can be any naturally occurring amino acid
CCEYCCXNXPACTXGCXY

SEQ ID NO: 1238 - protein, 17 aa, Artificial Sequence
  Synthetically generated peptide
  VARIANT (7)..(9): Xaa = Any Amino Acid
  misc_feature (15)..(15): Xaa can be any naturally occurring amino acid
CCEYCCXNXPACTGXCY

SEQ ID NO: 1239 - protein, 18 aa, Artificial Sequence
  Synthetically generated peptide
  VARIANT (7)..(9): Xaa = Any Amino Acid
  misc_feature (15)..(16): Xaa can be any naturally occurring amino acid
CCEYCCXNXPACTGXXCY

SEQ ID NO: 1240 - protein, 18 aa, Artificial Sequence
  Synthetically generated peptide
  VARIANT (7)..(9): Xaa = Any Amino Acid
  misc_feature (15)..(15): Xaa can be any naturally occurring amino acid
  misc_feature (17)..(17): Xaa can be any naturally occurring amino acid
CCEYCCXNXPACTGXCXY

SEQ ID NO: 1241 - protein, 17 aa, Artificial Sequence
  Synthetically generated peptide
  VARIANT (7)..(9): Xaa = Any Amino Acid
  misc_feature (16)..(16): Xaa can be any naturally occurring amino acid
CCEYCCXNXPACTGCXY

SEQ ID NO: 1242 - protein, 18 aa, Artificial Sequence
  Synthetically generated peptide
  VARIANT (7)..(9): Xaa = Any Amino Acid
  misc_feature (16)..(17): Xaa can be any naturally occurring amino acid
CCEYCCXNXPACTGCXXY

SEQ ID NO: 1243 - protein, 16 aa, Artificial Sequence
  Synthetically generated peptide
  VARIANT (7)..(10): Xaa = Any Amino Acid
CCEYCCXNPXACTGCY

SEQ ID NO: 1244 - protein, 17 aa, Artificial Sequence
  Synthetically generated peptide
  VARIANT (7)..(10): Xaa = Any Amino Acid
  misc_feature (11)..(11): Xaa can be any naturally occurring amino acid
CCEYCCXNPXXACTGCY

SEQ ID NO: 1245 - protein, 18 aa, Artificial Sequence
  Synthetically generated peptide
  VARIANT (7)..(10): Xaa = Any Amino Acid
  misc_feature (11)..(12): Xaa can be any naturally occurring amino acid
CCEYCCXNPXXXACTGCY

SEQ ID NO: 1246 - protein, 18 aa, Artificial Sequence
  Synthetically generated peptide
  VARIANT (7)..(10): Xaa = Any Amino Acid
  misc_feature (11)..(11): Xaa can be any naturally occurring amino acid
  misc_feature (13)..(13): Xaa can be any naturally occurring amino acid
CCEYCCXNPXXAXCTGCY

SEQ ID NO: 1247 - protein, 18 aa, Artificial Sequence
  Synthetically generated peptide
  VARIANT (7)..(10): Xaa = Any Amino Acid
  misc_feature (11)..(11): Xaa can be any naturally occurring amino acid
  misc_feature (14)..(14): Xaa can be any naturally occurring amino acid
CCEYCCXNPXXACXTGCY

SEQ ID NO: 1248 - protein, 18 aa, Artificial Sequence
  Synthetically generated peptide
  VARIANT (7)..(10): Xaa = Any Amino Acid
  misc_feature (11)..(11): Xaa can be any naturally occurring amino acid
  misc_feature (15)..(15): Xaa can be any naturally occurring amino acid
CCEYCCXNPXXACTXGCY

SEQ ID NO: 1249 - protein, 18 aa, Artificial Sequence
  Synthetically generated peptide
  VARIANT (7)..(10): Xaa = Any Amino Acid
  misc_feature (11)..(11): Xaa can be any naturally occurring amino acid
  misc_feature (16)..(16): Xaa can be any naturally occurring amino acid
CCEYCCXNPXXACTGXCY

SEQ ID NO: 1250 - protein, 18 aa, Artificial Sequence
  Synthetically generated peptide
  VARIANT (7)..(10): Xaa = Any Amino Acid
  misc_feature (11)..(11): Xaa can be any naturally occurring amino acid
  misc_feature (17)..(17): Xaa can be any naturally occurring amino acid
CCEYCCXNPXXACTGCXY

SEQ ID NO: 1251 - protein, 17 aa, Artificial Sequence
  Synthetically generated peptide
  VARIANT (7)..(10): Xaa = Any Amino Acid
  misc_feature (12)..(12): Xaa can be any naturally occurring amino acid
CCEYCCXNPXAXCTGCY

SEQ ID NO: 1252 - protein, 18 aa, Artificial Sequence
  Synthetically generated peptide
  VARIANT (7)..(10): Xaa = Any Amino Acid
  misc_feature (12)..(13): Xaa can be any naturally occurring amino acid
CCEYCCXNPXAXXCTGCY

SEQ ID NO: 1253 - protein, 18 aa, Artificial Sequence
  Synthetically generated peptide
  VARIANT (7)..(10): Xaa = Any Amino Acid
  misc_feature (12)..(12): Xaa can be any naturally occurring amino acid
  misc_feature (14)..(14): Xaa can be any naturally occurring amino acid
CCEYCCXNPXAXCXTGCY

SEQ ID NO: 1254 - protein, 18 aa, Artificial Sequence
  Synthetically generated peptide
  VARIANT (7)..(10): Xaa = Any Amino Acid
  misc_feature (12)..(12): Xaa can be any naturally occurring amino acid
  misc_feature (15)..(15): Xaa can be any naturally occurring amino acid
CCEYCCXNPXAXCTXGCY

SEQ ID NO: 1255 - protein, 18 aa, Artificial Sequence
  Synthetically generated peptide
  VARIANT (7)..(10): Xaa = Any Amino Acid
  misc_feature (12)..(12): Xaa can be any naturally occurring amino acid
  misc_feature (16)..(16): Xaa can be any naturally occurring amino acid
CCEYCCXNPXAXCTGXCY

SEQ ID NO: 1256 - protein, 18 aa, Artificial Sequence
  Synthetically generated peptide
  VARIANT (7)..(10): Xaa = Any Amino Acid
  misc_feature (12)..(12): Xaa can be any naturally occurring amino acid
  misc_feature (17)..(17): Xaa can be any naturally occurring amino acid
CCEYCCXNPXAXCTGCXY

SEQ ID NO: 1257 - protein, 17 aa, Artificial Sequence
  Synthetically generated peptide
  VARIANT (7)..(10): Xaa = Any Amino Acid
  misc_feature (13)..(13): Xaa can be any naturally occurring amino acid
CCEYCCXNPXACXTGCY

SEQ ID NO: 1258 - protein, 18 aa, Artificial Sequence
  Synthetically generated peptide
  VARIANT (7)..(10): Xaa = Any Amino Acid
  misc_feature (13)..(14): Xaa can be any naturally occurring amino acid
CCEYCCXNPXACXXTGCY

SEQ ID NO: 1259 - protein, 18 aa, Artificial Sequence
  Synthetically generated peptide
  VARIANT (7)..(10): Xaa = Any Amino Acid
  misc_feature (13)..(13): Xaa can be any naturally occurring amino acid
  misc_feature (15)..(15): Xaa can be any naturally occurring amino acid
CCEYCCXNPXACXTXGCY

SEQ ID NO: 1260 - protein, 18 aa, Artificial Sequence
  Synthetically generated peptide
  VARIANT (7)..(10): Xaa = Any Amino Acid
  misc_feature (13)..(13): Xaa can be any naturally occurring amino acid
  misc_feature (16)..(16): Xaa can be any naturally occurring amino acid
CCEYCCXNPXACXTGXCY

SEQ ID NO: 1261 - protein, 18 aa, Artificial Sequence
  Synthetically generated peptide
  VARIANT (7)..(10): Xaa = Any Amino Acid
  misc_feature (13)..(13): Xaa can be any naturally occurring amino acid
  misc_feature (17)..(17): Xaa can be any naturally occurring amino acid
CCEYCCXNPXACXTGCXY

SEQ ID NO: 1262 - protein, 17 aa, Artificial Sequence
  Synthetically generated peptide
  VARIANT (7)..(10): Xaa = Any Amino Acid
  misc_feature (14)..(14): Xaa can be any naturally occurring amino acid
CCEYCCXNPXACTXGCY

SEQ ID NO: 1263 - protein, 18 aa, Artificial Sequence
  Synthetically generated peptide
  VARIANT (7)..(10): Xaa = Any Amino Acid
  misc_feature (14)..(15): Xaa can be any naturally occurring amino acid
CCEYCCXNPXACTXXGCY

SEQ ID NO: 1264 - protein, 18 aa, Artificial Sequence
  Synthetically generated peptide
  VARIANT (7)..(10): Xaa = Any Amino Acid
  misc_feature (14)..(14): Xaa can be any naturally occurring amino acid
  misc_feature (16)..(16): Xaa can be any naturally occurring amino acid
CCEYCCXNPXACTXGXCY

SEQ ID NO: 1265 - protein, 18 aa, Artificial Sequence
  Synthetically generated peptide
  VARIANT (7)..(10): Xaa = Any Amino Acid
  misc_feature (14)..(14): Xaa can be any naturally occurring amino acid
  misc_feature (17)..(17): Xaa can be any naturally occurring amino acid
CCEYCCXNPXACTXGCXY

SEQ ID NO: 1266 - protein, 17 aa, Artificial Sequence
  Synthetically generated peptide
  VARIANT (7)..(10): Xaa = Any Amino Acid
  misc_feature (15)..(15): Xaa can be any naturally occurring amino acid
CCEYCCXNPXACTGXCY

SEQ ID NO: 1267 - protein, 18 aa, Artificial Sequence
  Synthetically generated peptide
  VARIANT (7)..(10): Xaa = Any Amino Acid
  misc_feature (15)..(16): Xaa can be any naturally occurring amino acid
CCEYCCXNPXACTGXXCY

SEQ ID NO: 1268 - protein, 18 aa, Artificial Sequence
  Synthetically generated peptide
  VARIANT (7)..(10): Xaa = Any Amino Acid
  misc_feature (15)..(15): Xaa can be any naturally occurring amino acid
  misc_feature (17)..(17): Xaa can be any naturally occurring amino acid
CCEYCCXNPXACTGXCXY

SEQ ID NO: 1269 - protein, 17 aa, Artificial Sequence
  Synthetically generated peptide
  VARIANT (7)..(10): Xaa = Any Amino Acid
  misc_feature (16)..(16): Xaa can be any naturally occurring amino acid
CCEYCCXNPXACTGCXY

SEQ ID NO: 1270 - protein, 18 aa, Artificial Sequence
  Synthetically generated peptide
  VARIANT (7)..(10): Xaa = Any Amino Acid
  misc_feature (16)..(17): Xaa can be any naturally occurring amino acid
CCEYCCXNPXACTGCXXY

SEQ ID NO: 1271 - protein, 16 aa, Artificial Sequence
  Synthetically generated peptide
  VARIANT (7)..(11): Xaa = Any Amino Acid
CCEYCCXNPAXCTGCY

SEQ ID NO: 1272 - protein, 17 aa, Artificial Sequence
  Synthetically generated peptide
  VARIANT (7)..(11): Xaa = Any Amino Acid
  misc_feature (12)..(12): Xaa can be any naturally occurring amino acid
CCEYCCXNPAXXCTGCY

SEQ ID NO: 1273 - protein, 18 aa, Artificial Sequence
  Synthetically generated peptide
  VARIANT (7)..(11): Xaa = Any Amino Acid
  misc_feature (12)..(13): Xaa can be any naturally occurring amino acid
CCEYCCXNPAXXXCTGCY

SEQ ID NO: 1274 - protein, 18 aa, Artificial Sequence
  Synthetically generated peptide
  VARIANT (7)..(11): Xaa = Any Amino Acid
  misc_feature (12)..(12): Xaa can be any naturally occurring amino acid
  misc_feature (14)..(14): Xaa can be any naturally occurring amino acid
CCEYCCXNPAXXCXTGCY

SEQ ID NO: 1275 - protein, 18 aa, Artificial Sequence
  Synthetically generated peptide
  VARIANT (7)..(11): Xaa = Any Amino Acid
  misc_feature (12)..(12): Xaa can be any naturally occurring amino acid
  misc_feature (15)..(15): Xaa can be any naturally occurring amino acid
CCEYCCXNPAXXCTXGCY

SEQ ID NO: 1276 - protein, 18 aa, Artificial Sequence
  Synthetically generated peptide
  VARIANT (7)..(11): Xaa = Any Amino Acid
  misc_feature (12)..(12): Xaa can be any naturally occurring amino acid
  misc_feature (16)..(16): Xaa can be any naturally occurring amino acid
CCEYCCXNPAXXCTGXCY

SEQ ID NO: 1277 - protein, 18 aa, Artificial Sequence
  Synthetically generated peptide
  VARIANT (7)..(11): Xaa = Any Amino Acid
  misc_feature (12)..(12): Xaa can be any naturally occurring amino acid
  misc_feature (17)..(17): Xaa can be any naturally occurring amino acid
CCEYCCXNPAXXCTGCXY

SEQ ID NO: 1278 - protein, 17 aa, Artificial Sequence
  Synthetically generated peptide
  VARIANT (7)..(11): Xaa = Any Amino Acid
  misc_feature (13)..(13): Xaa can be any naturally occurring amino acid
CCEYCCXNPAXCXTGCY

SEQ ID NO: 1279 - protein, 18 aa, Artificial Sequence
  Synthetically generated peptide
  VARIANT (7)..(11): Xaa = Any Amino Acid
  misc_feature (13)..(14): Xaa can be any naturally occurring amino acid
CCEYCCXNPAXCXXTGCY

SEQ ID NO: 1280 - protein, 18 aa, Artificial Sequence
  Synthetically generated peptide
  VARIANT (7)..(11): Xaa = Any Amino Acid
  misc_feature (13)..(13): Xaa can be any naturally occurring amino acid
  misc_feature (15)..(15): Xaa can be any naturally occurring amino acid
CCEYCCXNPAXCXTXGCY

SEQ ID NO: 1281 - protein, 18 aa, Artificial Sequence
  Synthetically generated peptide
  VARIANT (7)..(11): Xaa = Any Amino Acid
  misc_feature (13)..(13): Xaa can be any naturally occurring amino acid
  misc_feature (16)..(16): Xaa can be any naturally occurring amino acid
CCEYCCXNPAXCXTGXCY

SEQ ID NO: 1282 - protein, 18 aa, Artificial Sequence
  Synthetically generated peptide
  VARIANT (7)..(11): Xaa = Any Amino Acid
  misc_feature (13)..(13): Xaa can be any naturally occurring amino acid
  misc_feature (17)..(17): Xaa can be any naturally occurring amino acid
CCEYCCXNPAXCXTGCXY

SEQ ID NO: 1283 - protein, 17 aa, Artificial Sequence
  Synthetically generated peptide
  VARIANT (7)..(11): Xaa = Any Amino Acid
  misc_feature (14)..(14): Xaa can be any naturally occurring amino acid
CCEYCCXNPAXCTXGCY

SEQ ID NO: 1284 - protein, 18 aa, Artificial Sequence
  Synthetically generated peptide
  VARIANT (7)..(11): Xaa = Any Amino Acid
  misc_feature (14)..(15): Xaa can be any naturally occurring amino acid
CCEYCCXNPAXCTXXGCY

SEQ ID NO: 1285 - protein, 18 aa, Artificial Sequence
  Synthetically generated peptide
  VARIANT (7)..(11): Xaa = Any Amino Acid
  misc_feature (14)..(14): Xaa can be any naturally occurring amino acid
  misc_feature (16)..(16): Xaa can be any naturally occurring amino acid
CCEYCCXNPAXCTXGXCY

SEQ ID NO: 1286 - protein, 18 aa, Artificial Sequence
  Synthetically generated peptide
  VARIANT (7)..(11): Xaa = Any Amino Acid
  misc_feature (14)..(14): Xaa can be any naturally occurring amino acid
  misc_feature (17)..(17): Xaa can be any naturally occurring amino acid
CCEYCCXNPAXCTXGCXY

SEQ ID NO: 1287 - protein, 17 aa, Artificial Sequence
  Synthetically generated peptide
  VARIANT (7)..(11): Xaa = Any Amino Acid
  misc_feature (15)..(15): Xaa can be any naturally occurring amino acid
CCEYCCXNPAXCTGXCY

SEQ ID NO: 1288 - protein, 18 aa, Artificial Sequence
  Synthetically generated peptide
  VARIANT (7)..(11): Xaa = Any Amino Acid
  misc_feature (15)..(16): Xaa can be any naturally occurring amino acid
CCEYCCXNPAXCTGXXCY

SEQ ID NO: 1289 - protein, 18 aa, Artificial Sequence
  Synthetically generated peptide
  VARIANT (7)..(11): Xaa = Any Amino Acid
  misc_feature (15)..(15): Xaa can be any naturally occurring amino acid
  misc_feature (17)..(17): Xaa can be any naturally occurring amino acid
CCEYCCXNPAXCTGXCXY

SEQ ID NO: 1290 - protein, 17 aa, Artificial Sequence
  Synthetically generated peptide
  VARIANT (7)..(11): Xaa = Any Amino Acid
  misc_feature (16)..(16): Xaa can be any naturally occurring amino acid
CCEYCCXNPAXCTGCXY

SEQ ID NO: 1291 - protein, 18 aa, Artificial Sequence
  Synthetically generated peptide
  VARIANT (7)..(11): Xaa = Any Amino Acid
  misc_feature (16)..(17): Xaa can be any naturally occurring amino acid
CCEYCCXNPAXCTGCXXY

SEQ ID NO: 1292 - protein, 16 aa, Artificial Sequence
  Synthetically generated peptide
  VARIANT (7)..(12): Xaa = Any Amino Acid
CCEYCCXNPACXTGCY

SEQ ID NO: 1293 - protein, 17 aa, Artificial Sequence
  Synthetically generated peptide
  VARIANT (7)..(12): Xaa = Any Amino Acid
  misc_feature (13)..(13): Xaa can be any naturally occurring amino acid
CCEYCCXNPACXXTGCY

SEQ ID NO: 1294 - protein, 18 aa, Artificial Sequence
  Synthetically generated peptide
  VARIANT (7)..(12): Xaa = Any Amino Acid
  misc_feature (13)..(14): Xaa can be any naturally occurring amino acid
CCEYCCXNPACXXXTGCY

SEQ ID NO: 1295 - protein, 18 aa, Artificial Sequence
  Synthetically generated peptide
  VARIANT (7)..(12): Xaa = Any Amino Acid
  misc_feature (13)..(13): Xaa can be any naturally occurring amino acid
  misc_feature (15)..(15): Xaa can be any naturally occurring amino acid
CCEYCCXNPACXXTXGCY

SEQ ID NO: 1296 - protein, 18 aa, Artificial Sequence
  Synthetically generated peptide
  VARIANT (7)..(12): Xaa = Any Amino Acid
  misc_feature (13)..(13): Xaa can be any naturally occurring amino acid
  misc_feature (16)..(16): Xaa can be any naturally occurring amino acid
CCEYCCXNPACXXTGXCY

SEQ ID NO: 1297 - protein, 18 aa, Artificial Sequence
  Synthetically generated peptide
  VARIANT (7)..(12): Xaa = Any Amino Acid
  misc_feature (13)..(13): Xaa can be any naturally occurring amino acid
  misc_feature (17)..(17): Xaa can be any naturally occurring amino acid
CCEYCCXNPACXXTGCXY

SEQ ID NO: 1298 - protein, 17 aa, Artificial Sequence
  Synthetically generated peptide
  VARIANT (7)..(12): Xaa = Any Amino Acid
  misc_feature (14)..(14): Xaa can be any naturally occurring amino acid
CCEYCCXNPACXTXGCY

SEQ ID NO: 1299 - protein, 18 aa, Artificial Sequence
  Synthetically generated peptide
  VARIANT (7)..(12): Xaa = Any Amino Acid
  misc_feature (14)..(15): Xaa can be any naturally occurring amino acid
CCEYCCXNPACXTXXGCY

SEQ ID NO: 1300 - protein, 18 aa, Artificial Sequence
  Synthetically generated peptide
  VARIANT (7)..(12): Xaa = Any Amino Acid
  misc_feature (14)..(14): Xaa can be any naturally occurring amino acid
  misc_feature (16)..(16): Xaa can be any naturally occurring amino acid
CCEYCCXNPACXTXGXCY

SEQ ID NO: 1301 - protein, 18 aa, Artificial Sequence
  Synthetically generated peptide
  VARIANT (7)..(12): Xaa = Any Amino Acid
  misc_feature (14)..(14): Xaa can be any naturally occurring amino acid
  misc_feature (17)..(17): Xaa can be any naturally occurring amino acid
CCEYCCXNPACXTXGCXY

SEQ ID NO: 1302 - protein, 17 aa, Artificial Sequence
  Synthetically generated peptide
  VARIANT (7)..(12): Xaa = Any Amino Acid
  misc_feature (15)..(15): Xaa can be any naturally occurring amino acid
CCEYCCXNPACXTGXCY

SEQ ID NO: 1303 - protein, 18 aa, Artificial Sequence
  Synthetically generated peptide
  VARIANT (7)..(12): Xaa = Any Amino Acid
  misc_feature (15)..(16): Xaa can be any naturally occurring amino acid
CCEYCCXNPACXTGXXCY

SEQ ID NO: 1304 - protein, 18 aa, Artificial Sequence
  Synthetically generated peptide
  VARIANT (7)..(12): Xaa = Any Amino Acid
  misc_feature (15)..(15): Xaa can be any naturally occurring amino acid
  misc_feature (17)..(17): Xaa can be any naturally occurring amino acid
CCEYCCXNPACXTGXCXY

SEQ ID NO: 1305 - protein, 17 aa, Artificial Sequence
  Synthetically generated peptide
  VARIANT (7)..(12): Xaa = Any Amino Acid
  misc_feature (16)..(16): Xaa can be any naturally occurring amino acid
CCEYCCXNPACXTGCXY

SEQ ID NO: 1306 - protein, 18 aa, Artificial Sequence
  Synthetically generated peptide
  VARIANT (7)..(12): Xaa = Any Amino Acid
  misc_feature (16)..(17): Xaa can be any naturally occurring amino acid
CCEYCCXNPACXTGCXXY

SEQ ID NO: 1307 - protein, 16 aa, Artificial Sequence
  Synthetically generated peptide
  VARIANT (1)..(16): Xaa = Any Amino Acid
  VARIANT (7)..(13): Xaa = Any Amino Acid
CCEYCCXNPACTXGCY

SEQ ID NO: 1308 - protein, 17 aa, Artificial Sequence
  Synthetically generated peptide
  VARIANT (7)..(13): Xaa = Any Amino Acid
  misc_feature (14)..(14): Xaa can be any naturally occurring amino acid
CCEYCCXNPACTXXGCY

SEQ ID NO: 1309 - protein, 18 aa, Artificial Sequence
  Synthetically generated peptide
  VARIANT (7)..(13): Xaa = Any Amino Acid
  misc_feature (14)..(15): Xaa can be any naturally occurring amino acid
CCEYCCXNPACTXXXGCY

SEQ ID NO: 1310 - protein, 18 aa, Artificial Sequence
  Synthetically generated peptide
  VARIANT (7)..(13): Xaa = Any Amino Acid
  misc_feature (14)..(14): Xaa can be any naturally occurring amino acid
  misc_feature (16)..(16): Xaa can be any naturally occurring amino acid
CCEYCCXNPACTXXGXCY

SEQ ID NO: 1311 - protein, 18 aa, Artificial Sequence
  Synthetically generated peptide
  VARIANT (7)..(13): Xaa = Any Amino Acid
  misc_feature (14)..(14): Xaa can be any naturally occurring amino acid
  misc_feature (17)..(17): Xaa can be any naturally occurring amino acid
CCEYCCXNPACTXXGCXY

SEQ ID NO: 1312 - protein, 17 aa, Artificial Sequence
  Synthetically generated peptide
  VARIANT (7)..(13): Xaa = Any Amino Acid
  misc_feature (15)..(15): Xaa can be any naturally occurring amino acid
CCEYCCXNPACTXGXCY

SEQ ID NO: 1313 - protein, 18 aa, Artificial Sequence
  Synthetically generated peptide
  VARIANT (7)..(13): Xaa = Any Amino Acid
  misc_feature (15)..(16): Xaa can be any naturally occurring amino acid
CCEYCCXNPACTXGXXCY

SEQ ID NO: 1314 - protein, 18 aa, Artificial Sequence
  Synthetically generated peptide
  VARIANT (7)..(13): Xaa = Any Amino Acid
  misc_feature (15)..(15): Xaa can be any naturally occurring amino acid
  misc_feature (17)..(17): Xaa can be any naturally occurring amino acid
CCEYCCXNPACTXGXCXY

SEQ ID NO: 1315 - protein, 17 aa, Artificial Sequence
  Synthetically generated peptide
  VARIANT (7)..(13): Xaa = Any Amino Acid
  misc_feature (16)..(16): Xaa can be any naturally occurring amino acid
CCEYCCXNPACTXGCXY

SEQ ID NO: 1316 - protein, 18 aa, Artificial Sequence
  Synthetically generated peptide
  VARIANT (7)..(13): Xaa = Any Amino Acid
  misc_feature (16)..(17): Xaa can be any naturally occurring amino acid
CCEYCCXNPACTXGCXXY

SEQ ID NO: 1317 - protein, 16 aa, Artificial Sequence
  Synthetically generated peptide
  VARIANT (7)..(14): Xaa = Any Amino Acid
CCEYCCXNPACTGXCY

SEQ ID NO: 1318 - protein, 17 aa, Artificial Sequence
  Synthetically generated peptide
  VARIANT (7)..(14): Xaa = Any Amino Acid
  misc_feature (15)..(15): Xaa can be any naturally occurring amino acid
CCEYCCXNPACTGXXCY

SEQ ID NO: 1319 - protein, 18 aa, Artificial Sequence
  Synthetically generated peptide
  VARIANT (7)..(14): Xaa = Any Amino Acid
  misc_feature (15)..(16): Xaa can be any naturally occurring amino acid
CCEYCCXNPACTGXXXCY

SEQ ID NO: 1320 - protein, 18 aa, Artificial Sequence
  Synthetically generated peptide
  VARIANT (7)..(14): Xaa = Any Amino Acid
  misc_feature (15)..(15): Xaa can be any naturally occurring amino acid
  misc_feature (17)..(17): Xaa can be any naturally occurring amino acid
CCEYCCXNPACTGXXCXY

SEQ ID NO: 1321 - protein, 17 aa, Artificial Sequence
  Synthetically generated peptide
  VARIANT (7)..(14): Xaa = Any Amino Acid
  misc_feature (16)..(16): Xaa can be any naturally occurring amino acid
CCEYCCXNPACTGXCXY

SEQ ID NO: 1322 - protein, 18 aa, Artificial Sequence
  Synthetically generated peptide
  VARIANT (7)..(14): Xaa = Any Amino Acid
  misc_feature (16)..(17): Xaa can be any naturally occurring amino acid
CCEYCCXNPACTGXCXXY

SEQ ID NO: 1323 - protein, 16 aa, Artificial Sequence
  Synthetically generated peptide
  VARIANT (7)..(15): Xaa = Any Amino Acid
CCEYCCXNPACTGCXY

SEQ ID NO: 1324 - protein, 17 aa, Artificial Sequence
  Synthetically generated peptide
  VARIANT (7)..(15): Xaa = Any Amino Acid
  misc_feature (16)..(16): Xaa can be any naturally occurring amino acid
CCEYCCXNPACTGCXXY

SEQ ID NO: 1325 - protein, 18 aa, Artificial Sequence
  Synthetically generated peptide
  VARIANT (7)..(15): Xaa = Any Amino Acid
  misc_feature (16)..(17): Xaa can be any naturally occurring amino acid
CCEYCCXNPACTGCXXXY

SEQ ID NO: 1326 - protein, 15 aa, Artificial Sequence
  Synthetically generated peptide
  VARIANT (8)..(8): Xaa = Any Amino Acid
CCEYCCNXPACTGCY

SEQ ID NO: 1327 - protein, 16 aa, Artificial Sequence
  Synthetically generated peptide
  VARIANT (8)..(9): Xaa = Any Amino Acid
CCEYCCNXXPACTGCY

SEQ ID NO: 1328 - protein, 17 aa, Artificial Sequence
  Synthetically generated peptide
  VARIANT (8)..(9): Xaa = Any Amino Acid
  misc_feature (10)..(10): Xaa can be any naturally occurring amino acid
CCEYCCNXXXPACTGCY

SEQ ID NO: 1329 - protein, 18 aa, Artificial Sequence
  Synthetically generated peptide
  VARIANT (8)..(9): Xaa = Any Amino Acid
  misc_feature (10)..(11): Xaa can be any naturally occurring amino acid
CCEYCCNXXXXPACTGCY

SEQ ID NO: 1330 - protein, 18 aa, Artificial Sequence
  Synthetically generated peptide
  VARIANT (8)..(9): Xaa = Any Amino Acid
  misc_feature (10)..(10): Xaa can be any naturally occurring amino acid
  misc_feature (12)..(12): Xaa can be any naturally occurring amino acid
CCEYCCNXXXPXACTGCY

SEQ ID NO: 1331 - protein, 18 aa, Artificial Sequence
  Synthetically generated peptide
  VARIANT (8)..(9): Xaa = Any Amino Acid
  misc_feature (10)..(10): Xaa can be any naturally occurring amino acid
  misc_feature (13)..(13): Xaa can be any naturally occurring amino acid
CCEYCCNXXXPAXCTGCY

SEQ ID NO: 1332 - protein, 18 aa, Artificial Sequence
  Synthetically generated peptide
  VARIANT (8)..(9): Xaa = Any Amino Acid
  misc_feature (10)..(10): Xaa can be any naturally occurring amino acid
  misc_feature (14)..(14): Xaa can be any naturally occurring amino acid
CCEYCCNXXXPACXTGCY

SEQ ID NO: 1333 - protein, 18 aa, Artificial Sequence
  Synthetically generated peptide
  VARIANT (8)..(9): Xaa = Any Amino Acid
  misc_feature (10)..(10): Xaa can be any naturally occurring amino acid
  misc_feature (15)..(15): Xaa can be any naturally occurring amino acid
CCEYCCNXXXPACTXGCY

SEQ ID NO: 1334 - protein, 18 aa, Artificial Sequence
  Synthetically generated peptide
  VARIANT (8)..(9): Xaa = Any Amino Acid
  misc_feature (10)..(10): Xaa can be any naturally occurring amino acid
  misc_feature (16)..(16): Xaa can be any naturally occurring amino acid
CCEYCCNXXXPACTGXCY

SEQ ID NO: 1335 - protein, 18 aa, Artificial Sequence
  Synthetically generated peptide
  VARIANT (8)..(9): Xaa = Any Amino Acid
  misc_feature (10)..(10): Xaa can be any naturally occurring amino acid
  misc_feature (17)..(17): Xaa can be any naturally occurring amino acid
CCEYCCNXXXPACTGCXY

SEQ ID NO: 1336 - protein, 17 aa, Artificial Sequence
  Synthetically generated peptide
  VARIANT (8)..(9): Xaa = Any Amino Acid
  misc_feature (11)..(11): Xaa can be any naturally occurring amino acid
CCEYCCNXXPXACTGCY

SEQ ID NO: 1337 - protein, 18 aa, Artificial Sequence
  Synthetically generated peptide
  VARIANT (8)..(9): Xaa = Any Amino Acid
  misc_feature (11)..(12): Xaa can be any naturally occurring amino acid
CCEYCCNXXPXXACTGCY

SEQ ID NO: 1338 - protein, 18 aa, Artificial Sequence
  Synthetically generated peptide
  VARIANT (8)..(9): Xaa = Any Amino Acid
  misc_feature (11)..(11): Xaa can be any naturally occurring amino acid
  misc_feature (13)..(13): Xaa can be any naturally occurring amino acid
CCEYCCNXXPXAXCTGCY

SEQ ID NO: 1339 - protein, 18 aa, Artificial Sequence
  Synthetically generated peptide
  VARIANT (8)..(9): Xaa = Any Amino Acid
  misc_feature (11)..(11): Xaa can be any naturally occurring amino acid
  misc_feature (14)..(14): Xaa can be any naturally occurring amino acid
CCEYCCNXXPXACXTGCY

SEQ ID NO: 1340 - protein, 18 aa, Artificial Sequence
  Synthetically generated peptide
  VARIANT (8)..(9): Xaa = Any Amino Acid
  misc_feature (11)..(11): Xaa can be any naturally occurring amino acid
  misc_feature (15)..(15): Xaa can be any naturally occurring amino acid
CCEYCCNXXPXACTXGCY

SEQ ID NO: 1341 - protein, 18 aa, Artificial Sequence
  Synthetically generated peptide
  VARIANT (8)..(9): Xaa = Any Amino Acid
  misc_feature (11)..(11): Xaa can be any naturally occurring amino acid
  misc_feature (16)..(16): Xaa can be any naturally occurring amino acid
CCEYCCNXXPXACTGXCY

SEQ ID NO: 1342 - protein, 18 aa, Artificial Sequence
  Synthetically generated peptide
  VARIANT (8)..(9): Xaa = Any Amino Acid
  misc_feature (11)..(11): Xaa can be any naturally occurring amino acid
  misc_feature (17)..(17): Xaa can be any naturally occurring amino acid
CCEYCCNXXPXACTGCXY

SEQ ID NO: 1343 - protein, 17 aa, Artificial Sequence
  Synthetically generated peptide
  VARIANT (8)..(9): Xaa = Any Amino Acid
  misc_feature (12)..(12): Xaa can be any naturally occurring amino acid
CCEYCCNXXPAXCTGCY

SEQ ID NO: 1344 - protein, 18 aa, Artificial Sequence
  Synthetically generated peptide
  VARIANT (8)..(9): Xaa = Any Amino Acid
  misc_feature (12)..(13): Xaa can be any naturally occurring amino acid
CCEYCCNXXPAXXCTGCY

SEQ ID NO: 1345 - protein, 18 aa, Artificial Sequence
  Synthetically generated peptide
  VARIANT (8)..(9): Xaa = Any Amino Acid
  misc_feature (12)..(12): Xaa can be any naturally occurring amino acid
  misc_feature (14)..(14): Xaa can be any naturally occurring amino acid
CCEYCCNXXPAXCXTGCY

SEQ ID NO: 1346 - protein, 18 aa, Artificial Sequence
  Synthetically generated peptide
  VARIANT (8)..(9): Xaa = Any Amino Acid
  misc_feature (12)..(12): Xaa can be any naturally occurring amino acid
  misc_feature (15)..(15): Xaa can be any naturally occurring amino acid
CCEYCCNXXPAXCTXGCY

SEQ ID NO: 1347 - protein, 18 aa, Artificial Sequence
  Synthetically generated peptide
  VARIANT (8)..(9): Xaa = Any Amino Acid
  misc_feature (12)..(12): Xaa can be any naturally occurring amino acid
  misc_feature (16)..(16): Xaa can be any naturally occurring amino acid
CCEYCCNXXPAXCTGXCY

SEQ ID NO: 1348 - protein, 18 aa, Artificial Sequence
  Synthetically generated peptide
  VARIANT (8)..(9): Xaa = Any Amino Acid
  misc_feature (12)..(12): Xaa can be any naturally occurring amino acid
  misc_feature (17)..(17): Xaa can be any naturally occurring amino acid
CCEYCCNXXPAXCTGCXY

SEQ ID NO: 1349 - protein, 17 aa, Artificial Sequence
  Synthetically generated peptide
  VARIANT (8)..(9): Xaa = Any Amino Acid
  misc_feature (13)..(13): Xaa can be any naturally occurring amino acid
CCEYCCNXXPACXTGCY

SEQ ID NO: 1350 - protein, 18 aa, Artificial Sequence
  Synthetically generated peptide
  VARIANT (8)..(9): Xaa = Any Amino Acid
  misc_feature (13)..(14): Xaa can be any naturally occurring amino acid
CCEYCCNXXPACXXTGCY

SEQ ID NO: 1351 - protein, 18 aa, Artificial Sequence
  Synthetically generated peptide
  VARIANT (8)..(9): Xaa = Any Amino Acid
  misc_feature (13)..(13): Xaa can be any naturally occurring amino acid
  misc_feature (15)..(15): Xaa can be any naturally occurring amino acid
CCEYCCNXXPACXTXGCY

SEQ ID NO: 1352 - protein, 18 aa, Artificial Sequence
  Synthetically generated peptide
  VARIANT (8)..(9): Xaa = Any Amino Acid
  misc_feature (13)..(13): Xaa can be any naturally occurring amino acid
  misc_feature (16)..(16): Xaa can be any naturally occurring amino acid
CCEYCCNXXPACXTGXCY

SEQ ID NO: 1353 - protein, 18 aa, Artificial Sequence
  Synthetically generated peptide
  VARIANT (8)..(9): Xaa = Any Amino Acid
  misc_feature (13)..(13): Xaa can be any naturally occurring amino acid
  misc_feature (17)..(17): Xaa can be any naturally occurring amino acid
CCEYCCNXXPACXTGCXY

SEQ ID NO: 1354 - protein, 17 aa, Artificial Sequence
  Synthetically generated peptide
  VARIANT (8)..(9): Xaa = Any Amino Acid
  misc_feature (14)..(14): Xaa can be any naturally occurring amino acid
CCEYCCNXXPACTXGCY

SEQ ID NO: 1355 - protein, 18 aa, Artificial Sequence
  Synthetically generated peptide
  VARIANT (8)..(9): Xaa = Any Amino Acid
  misc_feature (14)..(15): Xaa can be any naturally occurring amino acid
CCEYCCNXXPACTXXGCY

SEQ ID NO: 1356 - protein, 18 aa, Artificial Sequence
  Synthetically generated peptide
  VARIANT (8)..(9): Xaa = Any Amino Acid
  misc_feature (14)..(14): Xaa can be any naturally occurring amino acid
  misc_feature (16)..(16): Xaa can be any naturally occurring amino acid
CCEYCCNXXPACTXGXCY

SEQ ID NO: 1357 - protein, 18 aa, Artificial Sequence
  Synthetically generated peptide
  VARIANT (8)..(9): Xaa = Any Amino Acid
  misc_feature (14)..(14): Xaa can be any naturally occurring amino acid
  misc_feature (17)..(17): Xaa can be any naturally occurring amino acid
CCEYCCNXXPACTXGCXY

SEQ ID NO: 1358 - protein, 17 aa, Artificial Sequence
  Synthetically generated peptide
  VARIANT (8)..(9): Xaa = Any Amino Acid
  misc_feature (15)..(15): Xaa can be any naturally occurring amino acid
CCEYCCNXXPACTGXCY

SEQ ID NO: 1359 - protein, 18 aa, Artificial Sequence
  Synthetically generated peptide
  VARIANT (8)..(9): Xaa = Any Amino Acid
  misc_feature (15)..(16): Xaa can be any naturally occurring amino acid
CCEYCCNXXPACTGXXCY

SEQ ID NO: 1360 - protein, 18 aa, Artificial Sequence
  Synthetically generated peptide
  VARIANT (8)..(9): Xaa = Any Amino Acid
  misc_feature (15)..(15): Xaa can be any naturally occurring amino acid
  misc_feature (17)..(17): Xaa can be any naturally occurring amino acid
CCEYCCNXXPACTGXCXY

SEQ ID NO: 1361 - protein, 17 aa, Artificial Sequence
  Synthetically generated peptide
  VARIANT (8)..(9): Xaa = Any Amino Acid
  misc_feature (16)..(16): Xaa can be any naturally occurring amino acid
CCEYCCNXXPACTGCXY

SEQ ID NO: 1362 - protein, 18 aa, Artificial Sequence
  Synthetically generated peptide
  VARIANT (8)..(9): Xaa = Any Amino Acid
  misc_feature (16)..(17): Xaa can be any naturally occurring amino acid
CCEYCCNXXPACTGCXXY

SEQ ID NO: 1363 - protein, 16 aa, Artificial Sequence
  Synthetically generated peptide
  VARIANT (8)..(10): Xaa = Any Amino Acid
CCEYCCNXPXACTGCY

SEQ ID NO: 1364 - protein, 17 aa, Artificial Sequence
  Synthetically generated peptide
  VARIANT (8)..(10): Xaa = Any Amino Acid
  misc_feature (11)..(11): Xaa can be any naturally occurring amino acid
CCEYCCNXPXXACTGCY

SEQ ID NO: 1365 - protein, 18 aa, Artificial Sequence
  Synthetically generated peptide
  VARIANT (8)..(10): Xaa = Any Amino Acid
  misc_feature (11)..(12): Xaa can be any naturally occurring amino acid
CCEYCCNXPXXXACTGCY

SEQ ID NO: 1366 - protein, 18 aa, Artificial Sequence
  Synthetically generated peptide
  VARIANT (8)..(10): Xaa = Any Amino Acid
  misc_feature (11)..(11): Xaa can be any naturally occurring amino acid
  misc_feature (13)..(13): Xaa can be any naturally occurring amino acid
CCEYCCNXPXXAXCTGCY

SEQ ID NO: 1367 - protein, 18 aa, Artificial Sequence
  Synthetically generated peptide
  VARIANT (8)..(10): Xaa = Any Amino Acid
  misc_feature (11)..(11): Xaa can be any naturally occurring amino acid
  misc_feature (14)..(14): Xaa can be any naturally occurring amino acid
CCEYCCNXPXXACXTGCY

SEQ ID NO: 1368 - protein, 18 aa, Artificial Sequence
  Synthetically generated peptide
  VARIANT (8)..(10): Xaa = Any Amino Acid
  misc_feature (11)..(11): Xaa can be any naturally occurring amino acid
  misc_feature (15)..(15): Xaa can be any naturally occurring amino acid
CCEYCCNXPXXACTXGCY

SEQ ID NO: 1369 - protein, 18 aa, Artificial Sequence
  Synthetically generated peptide
  VARIANT (8)..(10): Xaa = Any Amino Acid
  misc_feature (11)..(11): Xaa can be any naturally occurring amino acid
  misc_feature (16)..(16): Xaa can be any naturally occurring amino acid
CCEYCCNXPXXACTGXCY

SEQ ID NO: 1370 - protein, 18 aa, Artificial Sequence
  Synthetically generated peptide
  VARIANT (8)..(10): Xaa = Any Amino Acid
  misc_feature (11)..(11): Xaa can be any naturally occurring amino acid
  misc_feature (17)..(17): Xaa can be any naturally occurring amino acid
CCEYCCNXPXXACTGCXY

SEQ ID NO: 1371 - protein, 17 aa, Artificial Sequence
  Synthetically generated peptide
  VARIANT (8)..(10): Xaa = Any Amino Acid
  misc_feature (12)..(12): Xaa can be any naturally occurring amino acid
CCEYCCNXPXAXCTGCY

SEQ ID NO: 1372 - protein, 18 aa, Artificial Sequence
  Synthetically generated peptide
  VARIANT (8)..(10): Xaa = Any Amino Acid
  misc_feature (12)..(13): Xaa can be any naturally occurring amino acid
CCEYCCNXPXAXXCTGCY

SEQ ID NO: 1373 - protein, 18 aa, Artificial Sequence
  Synthetically generated peptide
  VARIANT (8)..(10): Xaa = Any Amino Acid
  misc_feature (12)..(12): Xaa can be any naturally occurring amino acid
  misc_feature (14)..(14): Xaa can be any naturally occurring amino acid
CCEYCCNXPXAXCXTGCY

SEQ ID NO: 1374 - protein, 18 aa, Artificial Sequence
  Synthetically generated peptide
  VARIANT (8)..(10): Xaa = Any Amino Acid
  misc_feature (12)..(12): Xaa can be any naturally occurring amino acid
  misc_feature (15)..(15): Xaa can be any naturally occurring amino acid
CCEYCCNXPXAXCTXGCY

SEQ ID NO: 1375 - protein, 18 aa, Artificial Sequence
  Synthetically generated peptide
  VARIANT (8)..(10): Xaa = Any Amino Acid
  misc_feature (12)..(12): Xaa can be any naturally occurring amino acid
  misc_feature (16)..(16): Xaa can be any naturally occurring amino acid
CCEYCCNXPXAXCTGXCY

SEQ ID NO: 1376 - protein, 18 aa, Artificial Sequence
  Synthetically generated peptide
  VARIANT (8)..(10): Xaa = Any Amino Acid
  misc_feature (12)..(12): Xaa can be any naturally occurring amino acid
  misc_feature (17)..(17): Xaa can be any naturally occurring amino acid
CCEYCCNXPXAXCTGCXY

SEQ ID NO: 1377 - protein, 17 aa, Artificial Sequence
  Synthetically generated peptide
  VARIANT (8)..(10): Xaa = Any Amino Acid
  misc_feature (13)..(13): Xaa can be any naturally occurring amino acid
CCEYCCNXPXACXTGCY

SEQ ID NO: 1378 - protein, 18 aa, Artificial Sequence
  Synthetically generated peptide
  VARIANT (8)..(10): Xaa = Any Amino Acid
  misc_feature (13)..(14): Xaa can be any naturally occurring amino acid
CCEYCCNXPXACXXTGCY

SEQ ID NO: 1379 - protein, 18 aa, Artificial Sequence
  Synthetically generated peptide
  VARIANT (8)..(10): Xaa = Any Amino Acid
  misc_feature (13)..(13): Xaa can be any naturally occurring amino acid
  misc_feature (15)..(15): Xaa can be any naturally occurring amino acid
CCEYCCNXPXACXTXGCY

SEQ ID NO: 1380 - protein, 18 aa, Artificial Sequence
  Synthetically generated peptide
  VARIANT (8)..(10): Xaa = Any Amino Acid
  misc_feature (13)..(13): Xaa can be any naturally occurring amino acid
  misc_feature (16)..(16): Xaa can be any naturally occurring amino acid
CCEYCCNXPXACXTGXCY

SEQ ID NO: 1381 - protein, 18 aa, Artificial Sequence
  Synthetically generated peptide
  VARIANT (8)..(10): Xaa = Any Amino Acid
  misc_feature (13)..(13): Xaa can be any naturally occurring amino acid
  misc_feature (17)..(17): Xaa can be any naturally occurring amino acid
CCEYCCNXPXACXTGCXY

SEQ ID NO: 1382 - protein, 17 aa, Artificial Sequence
  Synthetically generated peptide
  VARIANT (8)..(10): Xaa = Any Amino Acid
  misc_feature (14)..(14): Xaa can be any naturally occurring amino acid
CCEYCCNXPXACTXGCY

SEQ ID NO: 1383 - protein, 18 aa, Artificial Sequence
  Synthetically generated peptide
  VARIANT (8)..(10): Xaa = Any Amino Acid
  misc_feature (14)..(15): Xaa can be any naturally occurring amino acid
CCEYCCNXPXACTXXGCY

SEQ ID NO: 1384 - protein, 18 aa, Artificial Sequence
  Synthetically generated peptide
  VARIANT (8)..(10): Xaa = Any Amino Acid
  misc_feature (14)..(14): Xaa can be any naturally occurring amino acid
  misc_feature (16)..(16): Xaa can be any naturally occurring amino acid
CCEYCCNXPXACTXGXCY

SEQ ID NO: 1385 - protein, 18 aa, Artificial Sequence
  Synthetically generated peptide
  VARIANT (8)..(10): Xaa = Any Amino Acid
  misc_feature (14)..(14): Xaa can be any naturally occurring amino acid
  misc_feature (17)..(17): Xaa can be any naturally occurring amino acid
CCEYCCNXPXACTXGCXY

SEQ ID NO: 1386 - protein, 17 aa, Artificial Sequence
  Synthetically generated peptide
  VARIANT (8)..(10): Xaa = Any Amino Acid
  misc_feature (15)..(15): Xaa can be any naturally occurring amino acid
CCEYCCNXPXACTGXCY

SEQ ID NO: 1387 - protein, 18 aa, Artificial Sequence
  Synthetically generated peptide
  VARIANT (8)..(10): Xaa = Any Amino Acid
  misc_feature (15)..(16): Xaa can be any naturally occurring amino acid
CCEYCCNXPXACTGXXCY

SEQ ID NO: 1388 - protein, 18 aa, Artificial Sequence
  Synthetically generated peptide
  VARIANT (8)..(10): Xaa = Any Amino Acid
  misc_feature (15)..(15): Xaa can be any naturally occurring amino acid
  misc_feature (17)..(17): Xaa can be any naturally occurring amino acid
CCEYCCNXPXACTGXCXY

SEQ ID NO: 1389 - protein, 17 aa, Artificial Sequence
  Synthetically generated peptide
  VARIANT (8)..(10): Xaa = Any Amino Acid
  misc_feature (16)..(16): Xaa can be any naturally occurring amino acid
CCEYCCNXPXACTGCXY

SEQ ID NO: 1390 - protein, 18 aa, Artificial Sequence
  Synthetically generated peptide
  VARIANT (8)..(10): Xaa = Any Amino Acid
  misc_feature (16)..(17): Xaa can be any naturally occurring amino acid
CCEYCCNXPXACTGCXXY

SEQ ID NO: 1391 - protein, 16 aa, Artificial Sequence
  Synthetically generated peptide
  VARIANT (8)..(11): Xaa = Any Amino Acid
CCEYCCNXPAXCTGCY

SEQ ID NO: 1392 - protein, 17 aa, Artificial Sequence
  Synthetically generated peptide
  VARIANT (8)..(11): Xaa = Any Amino Acid
  misc_feature (12)..(12): Xaa can be any naturally occurring amino acid
CCEYCCNXPAXXCTGCY

SEQ ID NO: 1393 - protein, 18 aa, Artificial Sequence
  Synthetically generated peptide
  VARIANT (8)..(11): Xaa = Any Amino Acid
  misc_feature (12)..(13): Xaa can be any naturally occurring amino acid
CCEYCCNXPAXXXCTGCY

SEQ ID NO: 1394 - protein, 18 aa, Artificial Sequence
  Synthetically generated peptide
  VARIANT (8)..(11): Xaa = Any Amino Acid
  misc_feature (12)..(12): Xaa can be any naturally occurring amino acid
  misc_feature (14)..(14): Xaa can be any naturally occurring amino acid
CCEYCCNXPAXXCXTGCY

SEQ ID NO: 1395 - protein, 18 aa, Artificial Sequence
  Synthetically generated peptide
  VARIANT (8)..(11): Xaa = Any Amino Acid
  misc_feature (12)..(12): Xaa can be any naturally occurring amino acid
  misc_feature (15)..(15): Xaa can be any naturally occurring amino acid
CCEYCCNXPAXXCTXGCY

SEQ ID NO: 1396 - protein, 18 aa, Artificial Sequence
  Synthetically generated peptide
  VARIANT (8)..(11): Xaa = Any Amino Acid
  misc_feature (12)..(12): Xaa can be any naturally occurring amino acid
  misc_feature (16)..(16): Xaa can be any naturally occurring amino acid
CCEYCCNXPAXXCTGXCY

SEQ ID NO: 1397 - protein, 18 aa, Artificial Sequence
  Synthetically generated peptide
  VARIANT (8)..(11): Xaa = Any Amino Acid
  misc_feature (12)..(12): Xaa can be any naturally occurring amino acid
  misc_feature (17)..(17): Xaa can be any naturally occurring amino acid
CCEYCCNXPAXXCTGCXY

SEQ ID NO: 1398 - protein, 17 aa, Artificial Sequence
  Synthetically generated peptide
  VARIANT (8)..(11): Xaa = Any Amino Acid
  misc_feature (13)..(13): Xaa can be any naturally occurring amino acid
CCEYCCNXPAXCXTGCY

SEQ ID NO: 1399 - protein, 18 aa, Artificial Sequence
  Synthetically generated peptide
  VARIANT (8)..(11): Xaa = Any Amino Acid
  misc_feature (13)..(14): Xaa can be any naturally occurring amino acid
CCEYCCNXPAXCXXTGCY

SEQ ID NO: 1400 - protein, 18 aa, Artificial Sequence
  Synthetically generated peptide
  VARIANT (8)..(11): Xaa = Any Amino Acid
  misc_feature (13)..(13): Xaa can be any naturally occurring amino acid
  misc_feature (15)..(15): Xaa can be any naturally occurring amino acid
CCEYCCNXPAXCXTXGCY

SEQ ID NO: 1401 - protein, 18 aa, Artificial Sequence
  Synthetically generated peptide
  VARIANT (8)..(11): Xaa = Any Amino Acid
  misc_feature (13)..(13): Xaa can be any naturally occurring amino acid
  misc_feature (16)..(16): Xaa can be any naturally occurring amino acid
CCEYCCNXPAXCXTGXCY

SEQ ID NO: 1402 - protein, 18 aa, Artificial Sequence
  Synthetically generated peptide
  VARIANT (8)..(11): Xaa = Any Amino Acid
  misc_feature (13)..(13): Xaa can be any naturally occurring amino acid
  misc_feature (17)..(17): Xaa can be any naturally occurring amino acid
CCEYCCNXPAXCXTGCXY

SEQ ID NO: 1403 - protein, 17 aa, Artificial Sequence
  Synthetically generated peptide
  VARIANT (8)..(11): Xaa = Any Amino Acid
  misc_feature (14)..(14): Xaa can be any naturally occurring amino acid
CCEYCCNXPAXCTXGCY

SEQ ID NO: 1404 - protein, 18 aa, Artificial Sequence
  Synthetically generated peptide
  VARIANT (8)..(11): Xaa = Any Amino Acid
  misc_feature (14)..(15): Xaa can be any naturally occurring amino acid
CCEYCCNXPAXCTXXGCY

SEQ ID NO: 1405 - protein, 18 aa, Artificial Sequence
  Synthetically generated peptide
  VARIANT (8)..(11): Xaa = Any Amino Acid
  misc_feature (14)..(14): Xaa can be any naturally occurring amino acid
  misc_feature (16)..(16): Xaa can be any naturally occurring amino acid
CCEYCCNXPAXCTXGXCY

SEQ ID NO: 1406 - protein, 18 aa, Artificial Sequence
  Synthetically generated peptide
  VARIANT (8)..(11): Xaa = Any Amino Acid
  misc_feature (14)..(14): Xaa can be any naturally occurring amino acid
  misc_feature (17)..(17): Xaa can be any naturally occurring amino acid
CCEYCCNXPAXCTXGCXY

SEQ ID NO: 1407 - protein, 17 aa, Artificial Sequence
  Synthetically generated peptide
  VARIANT (8)..(11): Xaa = Any Amino Acid
  misc_feature (15)..(15): Xaa can be any naturally occurring amino acid
CCEYCCNXPAXCTGXCY

SEQ ID NO: 1408 - protein, 18 aa, Artificial Sequence
  Synthetically generated peptide
  VARIANT (8)..(11): Xaa = Any Amino Acid
  misc_feature (15)..(16): Xaa can be any naturally occurring amino acid
CCEYCCNXPAXCTGXXCY

SEQ ID NO: 1409 - protein, 18 aa, Artificial Sequence
  Synthetically generated peptide
  VARIANT (8)..(11): Xaa = Any Amino Acid
  misc_feature (15)..(15): Xaa can be any naturally occurring amino acid
  misc_feature (17)..(17): Xaa can be any naturally occurring amino acid
CCEYCCNXPAXCTGXCXY

SEQ ID NO: 1410 - protein, 17 aa, Artificial Sequence
  Synthetically generated peptide
  VARIANT (8)..(11): Xaa = Any Amino Acid
  misc_feature (16)..(16): Xaa can be any naturally occurring amino acid
CCEYCCNXPAXCTGCXY

SEQ ID NO: 1411 - protein, 18 aa, Artificial Sequence
  Synthetically generated peptide
  VARIANT (8)..(11): Xaa = Any Amino Acid
  misc_feature (16)..(17): Xaa can be any naturally occurring amino acid
CCEYCCNXPAXCTGCXXY

SEQ ID NO: 1412 - protein, 16 aa, Artificial Sequence
  Synthetically generated peptide
  VARIANT (8)..(12): Xaa = Any Amino Acid
CCEYCCNXPACXTGCY

SEQ ID NO: 1413 - protein, 17 aa, Artificial Sequence
  Synthetically generated peptide
  VARIANT (8)..(12): Xaa = Any Amino Acid
  misc_feature (13)..(13): Xaa can be any naturally occurring amino acid
CCEYCCNXPACXXTGCY

SEQ ID NO: 1414 - protein, 18 aa, Artificial Sequence
  Synthetically generated peptide
  VARIANT (8)..(12): Xaa = Any Amino Acid
  misc_feature (13)..(14): Xaa can be any naturally occurring amino acid
CCEYCCNXPACXXXTGCY

SEQ ID NO: 1415 - protein, 18 aa, Artificial Sequence
  Synthetically generated peptide
  VARIANT (8)..(12): Xaa = Any Amino Acid
  misc_feature (13)..(13): Xaa can be any naturally occurring amino acid
  misc_feature (15)..(15): Xaa can be any naturally occurring amino acid
CCEYCCNXPACXXTXGCY

SEQ ID NO: 1416 - protein, 18 aa, Artificial Sequence
  Synthetically generated peptide
  VARIANT (8)..(12): Xaa = Any Amino Acid
  misc_feature (13)..(13): Xaa can be any naturally occurring amino acid
  misc_feature (16)..(16): Xaa can be any naturally occurring amino acid
CCEYCCNXPACXXTGXCY

SEQ ID NO: 1417 - protein, 18 aa, Artificial Sequence
  Synthetically generated peptide
  VARIANT (8)..(12): Xaa = Any Amino Acid
  misc_feature (13)..(13): Xaa can be any naturally occurring amino acid
  misc_feature (17)..(17): Xaa can be any naturally occurring amino acid
CCEYCCNXPACXXTGCXY

SEQ ID NO: 1418 - protein, 17 aa, Artificial Sequence
  Synthetically generated peptide
  VARIANT (8)..(12): Xaa = Any Amino Acid
  misc_feature (14)..(14): Xaa can be any naturally occurring amino acid
CCEYCCNXPACXTXGCY

SEQ ID NO: 1419 - protein, 18 aa, Artificial Sequence
  Synthetically generated peptide
  VARIANT (8)..(12): Xaa = Any Amino Acid
  misc_feature (14)..(15): Xaa can be any naturally occurring amino acid
CCEYCCNXPACXTXXGCY

SEQ ID NO: 1420 - protein, 18 aa, Artificial Sequence
  Synthetically generated peptide
  VARIANT (8)..(12): Xaa = Any Amino Acid
  misc_feature (14)..(14): Xaa can be any naturally occurring amino acid
  misc_feature (16)..(16): Xaa can be any naturally occurring amino acid
CCEYCCNXPACXTXGXCY

SEQ ID NO: 1421 - protein, 18 aa, Artificial Sequence
  Synthetically generated peptide
  VARIANT (8)..(12): Xaa = Any Amino Acid
  misc_feature (14)..(14): Xaa can be any naturally occurring amino acid
  misc_feature (17)..(17): Xaa can be any naturally occurring amino acid
CCEYCCNXPACXTXGCXY

SEQ ID NO: 1422 - protein, 17 aa, Artificial Sequence
  Synthetically generated peptide
  VARIANT (8)..(12): Xaa = Any Amino Acid
  misc_feature (15)..(15): Xaa can be any naturally occurring amino acid
CCEYCCNXPACXTGXCY

SEQ ID NO: 1423 - protein, 18 aa, Artificial Sequence
  Synthetically generated peptide
  VARIANT (8)..(12): Xaa = Any Amino Acid
  misc_feature (15)..(16): Xaa can be any naturally occurring amino acid
CCEYCCNXPACXTGXXCY

SEQ ID NO: 1424 - protein, 18 aa, Artificial Sequence
  Synthetically generated peptide
  VARIANT (8)..(12): Xaa = Any Amino Acid
  misc_feature (15)..(15): Xaa can be any naturally occurring amino acid
  misc_feature (17)..(17): Xaa can be any naturally occurring amino acid
CCEYCCNXPACXTGXCXY

SEQ ID NO: 1425 - protein, 17 aa, Artificial Sequence
  Synthetically generated peptide
  VARIANT (8)..(12): Xaa = Any Amino Acid
  misc_feature (16)..(16): Xaa can be any naturally occurring amino acid
CCEYCCNXPACXTGCXY

SEQ ID NO: 1426 - protein, 18 aa, Artificial Sequence
  Synthetically generated peptide
  VARIANT (8)..(12): Xaa = Any Amino Acid
  misc_feature (16)..(17): Xaa can be any naturally occurring amino acid
CCEYCCNXPACXTGCXXY

SEQ ID NO: 1427 - protein, 16 aa, Artificial Sequence
  Synthetically generated peptide
  VARIANT (8)..(13): Xaa = Any Amino Acid
CCEYCCNXPACTXGCY

SEQ ID NO: 1428 - protein, 17 aa, Artificial Sequence
  Synthetically generated peptide
  VARIANT (8)..(13): Xaa = Any Amino Acid
  misc_feature (14)..(14): Xaa can be any naturally occurring amino acid
CCEYCCNXPACTXXGCY

SEQ ID NO: 1429 - protein, 18 aa, Artificial Sequence
  Synthetically generated peptide
  VARIANT (8)..(13): Xaa = Any Amino Acid
  misc_feature (14)..(15): Xaa can be any naturally occurring amino acid
CCEYCCNXPACTXXXGCY

SEQ ID NO: 1430 - protein, 18 aa, Artificial Sequence
  Synthetically generated peptide
  VARIANT (8)..(13): Xaa = Any Amino Acid
  misc_feature (14)..(14): Xaa can be any naturally occurring amino acid
  misc_feature (16)..(16): Xaa can be any naturally occurring amino acid
CCEYCCNXPACTXXGXCY

SEQ ID NO: 1431 - protein, 18 aa, Artificial Sequence
  Synthetically generated peptide
  VARIANT (8)..(13): Xaa = Any Amino Acid
  misc_feature (14)..(14): Xaa can be any naturally occurring amino acid
  misc_feature (17)..(17): Xaa can be any naturally occurring amino acid
CCEYCCNXPACTXXGCXY

SEQ ID NO: 1432 - protein, 17 aa, Artificial Sequence
  Synthetically generated peptide
  VARIANT (8)..(13): Xaa = Any Amino Acid
  misc_feature (15)..(15): Xaa can be any naturally occurring amino acid
CCEYCCNXPACTXGXCY

SEQ ID NO: 1433 - protein, 18 aa, Artificial Sequence
  Synthetically generated peptide
  VARIANT (8)..(13): Xaa = Any Amino Acid
  misc_feature (15)..(16): Xaa can be any naturally occurring amino acid
CCEYCCNXPACTXGXXCY

SEQ ID NO: 1434 - protein, 18 aa, Artificial Sequence
  Synthetically generated peptide
  VARIANT (8)..(13): Xaa = Any Amino Acid
  misc_feature (15)..(15): Xaa can be any naturally occurring amino acid
  misc_feature (17)..(17): Xaa can be any naturally occurring amino acid
CCEYCCNXPACTXGXCXY

SEQ ID NO: 1435 - protein, 17 aa, Artificial Sequence
  Synthetically generated peptide
  VARIANT (8)..(13): Xaa = Any Amino Acid
  misc_feature (16)..(16): Xaa can be any naturally occurring amino acid
CCEYCCNXPACTXGCXY

SEQ ID NO: 1436 - protein, 18 aa, Artificial Sequence
  Synthetically generated peptide
  VARIANT (8)..(13): Xaa = Any Amino Acid
  misc_feature (16)..(17): Xaa can be any naturally occurring amino acid
CCEYCCNXPACTXGCXXY

SEQ ID NO: 1437 - protein, 16 aa, Artificial Sequence
  Synthetically generated peptide
  VARIANT (8)..(14): Xaa = Any Amino Acid
CCEYCCNXPACTGXCY

SEQ ID NO: 1438 - protein, 17 aa, Artificial Sequence
  Synthetically generated peptide
  VARIANT (8)..(14): Xaa = Any Amino Acid
  misc_feature (15)..(15): Xaa can be any naturally occurring amino acid
CCEYCCNXPACTGXXCY

SEQ ID NO: 1439 - protein, 18 aa, Artificial Sequence
  Synthetically generated peptide
  VARIANT (8)..(14): Xaa = Any Amino Acid
  misc_feature (15)..(16): Xaa can be any naturally occurring amino acid
CCEYCCNXPACTGXXXCY

SEQ ID NO: 1440 - protein, 18 aa, Artificial Sequence
  Synthetically generated peptide
  VARIANT (8)..(14): Xaa = Any Amino Acid
  misc_feature (15)..(15): Xaa can be any naturally occurring amino acid
  misc_feature (17)..(17): Xaa can be any naturally occurring amino acid
CCEYCCNXPACTGXXCXY

SEQ ID NO: 1441 - protein, 17 aa, Artificial Sequence
  Synthetically generated peptide
  VARIANT (8)..(14): Xaa = Any Amino Acid
  misc_feature (16)..(16): Xaa can be any naturally occurring amino acid
CCEYCCNXPACTGXCXY

SEQ ID NO: 1442 - protein, 18 aa, Artificial Sequence
  Synthetically generated peptide
  VARIANT (8)..(14): Xaa = Any Amino Acid
  misc_feature (16)..(17): Xaa can be any naturally occurring amino acid
CCEYCCNXPACTGXCXXY

SEQ ID NO: 1443 - protein, 16 aa, Artificial Sequence
  Synthetically generated peptide
  VARIANT (8)..(15): Xaa = Any Amino Acid
CCEYCCNXPACTGCXY

SEQ ID NO: 1444 - protein, 17 aa, Artificial Sequence
  Synthetically generated peptide
  VARIANT (8)..(15): Xaa = Any Amino Acid
  misc_feature (16)..(16): Xaa can be any naturally occurring amino acid
CCEYCCNXPACTGCXXY

SEQ ID NO: 1445 - protein, 18 aa, Artificial Sequence
  Synthetically generated peptide
  VARIANT (8)..(15): Xaa = Any Amino Acid
  misc_feature (16)..(17): Xaa can be any naturally occurring amino acid
CCEYCCNXPACTGCXXXY

SEQ ID NO: 1446 - protein, 15 aa, Artificial Sequence
  Synthetically generated peptide
  VARIANT (9)..(9): Xaa = Any Amino Acid
CCEYCCNPXACTGCY

SEQ ID NO: 1447 - protein, 16 aa, Artificial Sequence
  Synthetically generated peptide
  VARIANT (9)..(10): Xaa = Any Amino Acid
CCEYCCNPXXACTGCY

SEQ ID NO: 1448 - protein, 17 aa, Artificial Sequence
  Synthetically generated peptide
  VARIANT (9)..(10): Xaa = Any Amino Acid
  misc_feature (11)..(11): Xaa can be any naturally occurring amino acid
CCEYCCNPXXXACTGCY

SEQ ID NO: 1449 - protein, 18 aa, Artificial Sequence
  Synthetically generated peptide
  VARIANT (9)..(10): Xaa = Any Amino Acid
  misc_feature (11)..(12): Xaa can be any naturally occurring amino acid
CCEYCCNPXXXXACTGCY

SEQ ID NO: 1450 - protein, 18 aa, Artificial Sequence
  Synthetically generated peptide
  VARIANT (9)..(10): Xaa = Any Amino Acid
  misc_feature (11)..(11): Xaa can be any naturally occurring amino acid
  misc_feature (13)..(13): Xaa can be any naturally occurring amino acid
CCEYCCNPXXXAXCTGCY

SEQ ID NO: 1451 - protein, 18 aa, Artificial Sequence
  Synthetically generated peptide
  VARIANT (9)..(10): Xaa = Any Amino Acid
  misc_feature (11)..(11): Xaa can be any naturally occurring amino acid
  misc_feature (14)..(14): Xaa can be any naturally occurring amino acid
CCEYCCNPXXXACXTGCY

SEQ ID NO: 1452 - protein, 18 aa, Artificial Sequence
  Synthetically generated peptide
  VARIANT (9)..(10): Xaa = Any Amino Acid
  misc_feature (11)..(11): Xaa can be any naturally occurring amino acid
  misc_feature (15)..(15): Xaa can be any naturally occurring amino acid
CCEYCCNPXXXACTXGCY

SEQ ID NO: 1453 - protein, 18 aa, Artificial Sequence
  Synthetically generated peptide
  VARIANT (9)..(10): Xaa = Any Amino Acid
  misc_feature (11)..(11): Xaa can be any naturally occurring amino acid
  misc_feature (16)..(16): Xaa can be any naturally occurring amino acid
CCEYCCNPXXXACTGXCY

SEQ ID NO: 1454 - protein, 18 aa, Artificial Sequence
  Synthetically generated peptide
  VARIANT (9)..(10): Xaa = Any Amino Acid
  misc_feature (11)..(11): Xaa can be any naturally occurring amino acid
  misc_feature (17)..(17): Xaa can be any naturally occurring amino acid
CCEYCCNPXXXACTGCXY

SEQ ID NO: 1455 - protein, 17 aa, Artificial Sequence
  Synthetically generated peptide
  VARIANT (9)..(10): Xaa = Any Amino Acid
  misc_feature (12)..(12): Xaa can be any naturally occurring amino acid
CCEYCCNPXXAXCTGCY

SEQ ID NO: 1456 - protein, 18 aa, Artificial Sequence
  Synthetically generated peptide
  VARIANT (9)..(10): Xaa = Any Amino Acid
  misc_feature (12)..(13): Xaa can be any naturally occurring amino acid
CCEYCCNPXXAXXCTGCY

SEQ ID NO: 1457 - protein, 18 aa, Artificial Sequence
  Synthetically generated peptide
  VARIANT (9)..(10): Xaa = Any Amino Acid
  misc_feature (12)..(12): Xaa can be any naturally occurring amino acid
  misc_feature (14)..(14): Xaa can be any naturally occurring amino acid
CCEYCCNPXXAXCXTGCY

SEQ ID NO: 1458 - protein, 18 aa, Artificial Sequence
  Synthetically generated peptide
  VARIANT (9)..(10): Xaa = Any Amino Acid
  misc_feature (12)..(12): Xaa can be any naturally occurring amino acid
  misc_feature (15)..(15): Xaa can be any naturally occurring amino acid
CCEYCCNPXXAXCTXGCY

SEQ ID NO: 1459 - protein, 18 aa, Artificial Sequence
  Synthetically generated peptide
  VARIANT (9)..(10): Xaa = Any Amino Acid
  misc_feature (12)..(12): Xaa can be any naturally occurring amino acid
  misc_feature (16)..(16): Xaa can be any naturally occurring amino acid
CCEYCCNPXXAXCTGXCY

SEQ ID NO: 1460 - protein, 18 aa, Artificial Sequence
  Synthetically generated peptide
  VARIANT (9)..(10): Xaa = Any Amino Acid
  misc_feature (12)..(12): Xaa can be any naturally occurring amino acid
  misc_feature (17)..(17): Xaa can be any naturally occurring amino acid
CCEYCCNPXXAXCTGCXY

SEQ ID NO: 1461 - protein, 17 aa, Artificial Sequence
  Synthetically generated peptide
  VARIANT (9)..(10): Xaa = Any Amino Acid
  misc_feature (13)..(13): Xaa can be any naturally occurring amino acid
CCEYCCNPXXACXTGCY

SEQ ID NO: 1462 - protein, 18 aa, Artificial Sequence
  Synthetically generated peptide
  VARIANT (9)..(10): Xaa = Any Amino Acid
  misc_feature (13)..(14): Xaa can be any naturally occurring amino acid
CCEYCCNPXXACXXTGCY

SEQ ID NO: 1463 - protein, 18 aa, Artificial Sequence
  Synthetically generated peptide
  VARIANT (9)..(10): Xaa = Any Amino Acid
  misc_feature (13)..(13): Xaa can be any naturally occurring amino acid
  misc_feature (15)..(15): Xaa can be any naturally occurring amino acid
CCEYCCNPXXACXTXGCY

SEQ ID NO: 1464 - protein, 18 aa, Artificial Sequence
  Synthetically generated peptide
  VARIANT (9)..(10): Xaa = Any Amino Acid
  misc_feature (13)..(13): Xaa can be any naturally occurring amino acid
  misc_feature (16)..(16): Xaa can be any naturally occurring amino acid
CCEYCCNPXXACXTGXCY

SEQ ID NO: 1465 - protein, 18 aa, Artificial Sequence
  Synthetically generated peptide
  VARIANT (9)..(10): Xaa = Any Amino Acid
  misc_feature (13)..(13): Xaa can be any naturally occurring amino acid
  misc_feature (17)..(17): Xaa can be any naturally occurring amino acid
CCEYCCNPXXACXTGCXY

SEQ ID NO: 1466 - protein, 17 aa, Artificial Sequence
  Synthetically generated peptide
  VARIANT (9)..(10): Xaa = Any Amino Acid
  misc_feature (14)..(14): Xaa can be any naturally occurring amino acid
CCEYCCNPXXACTXGCY

SEQ ID NO: 1467 - protein, 18 aa, Artificial Sequence
  Synthetically generated peptide
  VARIANT (9)..(10): Xaa = Any Amino Acid
  misc_feature (14)..(15): Xaa can be any naturally occurring amino acid
CCEYCCNPXXACTXXGCY

SEQ ID NO: 1468 - protein, 18 aa, Artificial Sequence
  Synthetically generated peptide
  VARIANT (9)..(10): Xaa = Any Amino Acid
  misc_feature (14)..(14): Xaa can be any naturally occurring amino acid
  misc_feature (16)..(16): Xaa can be any naturally occurring amino acid
CCEYCCNPXXACTXGXCY

SEQ ID NO: 1469 - protein, 18 aa, Artificial Sequence
  Synthetically generated peptide
  VARIANT (9)..(10): Xaa = Any Amino Acid
  misc_feature (14)..(14): Xaa can be any naturally occurring amino acid
  misc_feature (17)..(17): Xaa can be any naturally occurring amino acid
CCEYCCNPXXACTXGCXY

SEQ ID NO: 1470 - protein, 17 aa, Artificial Sequence
  Synthetically generated peptide
  VARIANT (9)..(10): Xaa = Any Amino Acid
  misc_feature (15)..(15): Xaa can be any naturally occurring amino acid
CCEYCCNPXXACTGXCY

SEQ ID NO: 1471 - protein, 18 aa, Artificial Sequence
  Synthetically generated peptide
  VARIANT (9)..(10): Xaa = Any Amino Acid
  misc_feature (15)..(16): Xaa can be any naturally occurring amino acid
CCEYCCNPXXACTGXXCY

SEQ ID NO: 1472 - protein, 18 aa, Artificial Sequence
  Synthetically generated peptide
  VARIANT (9)..(10): Xaa = Any Amino Acid
  misc_feature (15)..(15): Xaa can be any naturally occurring amino acid
  misc_feature (17)..(17): Xaa can be any naturally occurring amino acid
CCEYCCNPXXACTGXCXY

SEQ ID NO: 1473 - protein, 17 aa, Artificial Sequence
  Synthetically generated peptide
  VARIANT (9)..(10): Xaa = Any Amino Acid
  misc_feature (16)..(16): Xaa can be any naturally occurring amino acid
CCEYCCNPXXACTGCXY

SEQ ID NO: 1474 - protein, 18 aa, Artificial Sequence
  Synthetically generated peptide
  VARIANT (9)..(10): Xaa = Any Amino Acid
  misc_feature (16)..(17): Xaa can be any naturally occurring amino acid
CCEYCCNPXXACTGCXXY

SEQ ID NO: 1475 - protein, 16 aa, Artificial Sequence
  Synthetically generated peptide
  VARIANT (1)..(16): Xaa = Any Amino Acid
  VARIANT (9)..(11): Xaa = Any Amino Acid
CCEYCCNPXAXCTGCY

SEQ ID NO: 1476 - protein, 17 aa, Artificial Sequence
  Synthetically generated peptide
  VARIANT (9)..(11): Xaa = Any Amino Acid
  misc_feature (12)..(12): Xaa can be any naturally occurring amino acid
CCEYCCNPXAXXCTGCY

SEQ ID NO: 1477 - protein, 18 aa, Artificial Sequence
  Synthetically generated peptide
  VARIANT (9)..(11): Xaa = Any Amino Acid
  misc_feature (12)..(13): Xaa can be any naturally occurring amino acid
CCEYCCNPXAXXXCTGCY

SEQ ID NO: 1478 - protein, 18 aa, Artificial Sequence
  Synthetically generated peptide
  VARIANT (9)..(11): Xaa = Any Amino Acid
  misc_feature (12)..(12): Xaa can be any naturally occurring amino acid
  misc_feature (14)..(14): Xaa can be any naturally occurring amino acid
CCEYCCNPXAXXCXTGCY

SEQ ID NO: 1479 - protein, 18 aa, Artificial Sequence
  Synthetically generated peptide
  VARIANT (9)..(11): Xaa = Any Amino Acid
  misc_feature (12)..(12): Xaa can be any naturally occurring amino acid
  misc_feature (15)..(15): Xaa can be any naturally occurring amino acid
CCEYCCNPXAXXCTXGCY

SEQ ID NO: 1480 - protein, 18 aa, Artificial Sequence
  Synthetically generated peptide
  VARIANT (9)..(11): Xaa = Any Amino Acid
  misc_feature (12)..(12): Xaa can be any naturally occurring amino acid
  misc_feature (16)..(16): Xaa can be any naturally occurring amino acid
CCEYCCNPXAXXCTGXCY

SEQ ID NO: 1481 - protein, 18 aa, Artificial Sequence
  Synthetically generated peptide
  VARIANT (9)..(11): Xaa = Any Amino Acid
  misc_feature (12)..(12): Xaa can be any naturally occurring amino acid
  misc_feature (17)..(17): Xaa can be any naturally occurring amino acid
CCEYCCNPXAXXCTGCXY

SEQ ID NO: 1482 - protein, 17 aa, Artificial Sequence
  Synthetically generated peptide
  VARIANT (9)..(11): Xaa = Any Amino Acid
  misc_feature (13)..(13): Xaa can be any naturally occurring amino acid
CCEYCCNPXAXCXTGCY

SEQ ID NO: 1483 - protein, 18 aa, Artificial Sequence
  Synthetically generated peptide
  VARIANT (9)..(11): Xaa = Any Amino Acid
  misc_feature (13)..(14): Xaa can be any naturally occurring amino acid
CCEYCCNPXAXCXXTGCY

SEQ ID NO: 1484 - protein, 18 aa, Artificial Sequence
  Synthetically generated peptide
  VARIANT (9)..(11): Xaa = Any Amino Acid
  misc_feature (13)..(13): Xaa can be any naturally occurring amino acid
  misc_feature (15)..(15): Xaa can be any naturally occurring amino acid
CCEYCCNPXAXCXTXGCY

SEQ ID NO: 1485 - protein, 18 aa, Artificial Sequence
  Synthetically generated peptide
  VARIANT (9)..(11): Xaa = Any Amino Acid
  misc_feature (13)..(13): Xaa can be any naturally occurring amino acid
  misc_feature (16)..(16): Xaa can be any naturally occurring amino acid
CCEYCCNPXAXCXTGXCY

SEQ ID NO: 1486 - protein, 18 aa, Artificial Sequence
  Synthetically generated peptide
  VARIANT (9)..(11): Xaa = Any Amino Acid
  misc_feature (13)..(13): Xaa can be any naturally occurring amino acid
  misc_feature (17)..(17): Xaa can be any naturally occurring amino acid
CCEYCCNPXAXCXTGCXY

SEQ ID NO: 1487 - protein, 17 aa, Artificial Sequence
  Synthetically generated peptide
  VARIANT (9)..(11): Xaa = Any Amino Acid
  misc_feature (14)..(14): Xaa can be any naturally occurring amino acid
CCEYCCNPXAXCTXGCY

SEQ ID NO: 1488 - protein, 18 aa, Artificial Sequence
  Synthetically generated peptide
  VARIANT (9)..(11): Xaa = Any Amino Acid
  misc_feature (14)..(15): Xaa can be any naturally occurring amino acid
CCEYCCNPXAXCTXXGCY

SEQ ID NO: 1489 - protein, 18 aa, Artificial Sequence
  Synthetically generated peptide
  VARIANT (9)..(11): Xaa = Any Amino Acid
  misc_feature (14)..(14): Xaa can be any naturally occurring amino acid
  misc_feature (16)..(16): Xaa can be any naturally occurring amino acid
CCEYCCNPXAXCTXGXCY

SEQ ID NO: 1490 - protein, 18 aa, Artificial Sequence
  Synthetically generated peptide
  VARIANT (9)..(11): Xaa = Any Amino Acid
  misc_feature (14)..(14): Xaa can be any naturally occurring amino acid
  misc_feature (17)..(17): Xaa can be any naturally occurring amino acid
CCEYCCNPXAXCTXGCXY

SEQ ID NO: 1491 - protein, 17 aa, Artificial Sequence
  Synthetically generated peptide
  VARIANT (9)..(11): Xaa = Any Amino Acid
  misc_feature (15)..(15): Xaa can be any naturally occurring amino acid
CCEYCCNPXAXCTGXCY

SEQ ID NO: 1492 - protein, 18 aa, Artificial Sequence
  Synthetically generated peptide
  VARIANT (9)..(11): Xaa = Any Amino Acid
  misc_feature (15)..(16): Xaa can be any naturally occurring amino acid
CCEYCCNPXAXCTGXXCY

SEQ ID NO: 1493 - protein, 18 aa, Artificial Sequence
  Synthetically generated peptide
  VARIANT (9)..(11): Xaa = Any Amino Acid
  misc_feature (15)..(15): Xaa can be any naturally occurring amino acid
  misc_feature (17)..(17): Xaa can be any naturally occurring amino acid
CCEYCCNPXAXCTGXCXY

SEQ ID NO: 1494 - protein, 17 aa, Artificial Sequence
  Synthetically generated peptide
  VARIANT (9)..(11): Xaa = Any Amino Acid
  misc_feature (16)..(16): Xaa can be any naturally occurring amino acid
CCEYCCNPXAXCTGCXY

SEQ ID NO: 1495 - protein, 18 aa, Artificial Sequence
  Synthetically generated peptide
  VARIANT (9)..(11): Xaa = Any Amino Acid
  misc_feature (16)..(17): Xaa can be any naturally occurring amino acid
CCEYCCNPXAXCTGCXXY

SEQ ID NO: 1496 - protein, 16 aa, Artificial Sequence
  Synthetically generated peptide
  VARIANT (9)..(12): Xaa = Any Amino Acid
CCEYCCNPXACXTGCY

SEQ ID NO: 1497 - protein, 17 aa, Artificial Sequence
  Synthetically generated peptide
  VARIANT (9)..(12): Xaa = Any Amino Acid
  misc_feature (13)..(13): Xaa can be any naturally occurring amino acid
CCEYCCNPXACXXTGCY

SEQ ID NO: 1498 - protein, 18 aa, Artificial Sequence
  Synthetically generated peptide
  VARIANT (9)..(12): Xaa = Any Amino Acid
  misc_feature (13)..(14): Xaa can be any naturally occurring amino acid
CCEYCCNPXACXXXTGCY

SEQ ID NO: 1499 - protein, 18 aa, Artificial Sequence
  Synthetically generated peptide
  VARIANT (9)..(12): Xaa = Any Amino Acid
  misc_feature (13)..(13): Xaa can be any naturally occurring amino acid
  misc_feature (15)..(15): Xaa can be any naturally occurring amino acid
CCEYCCNPXACXXTXGCY

SEQ ID NO: 1500 - protein, 18 aa, Artificial Sequence
  Synthetically generated peptide
  VARIANT (9)..(12): Xaa = Any Amino Acid
  misc_feature (13)..(13): Xaa can be any naturally occurring amino acid
  misc_feature (16)..(16): Xaa can be any naturally occurring amino acid
CCEYCCNPXACXXTGXCY

SEQ ID NO: 1501 - protein, 18 aa, Artificial Sequence
  Synthetically generated peptide
  VARIANT (9)..(12): Xaa = Any Amino Acid
  misc_feature (13)..(13): Xaa can be any naturally occurring amino acid
  misc_feature (17)..(17): Xaa can be any naturally occurring amino acid
CCEYCCNPXACXXTGCXY

SEQ ID NO: 1502 - protein, 17 aa, Artificial Sequence
  Synthetically generated peptide
  VARIANT (9)..(12): Xaa = Any Amino Acid
  misc_feature (14)..(14): Xaa can be any naturally occurring amino acid
CCEYCCNPXACXTXGCY

SEQ ID NO: 1503 - protein, 18 aa, Artificial Sequence
  Synthetically generated peptide
  VARIANT (9)..(12): Xaa = Any Amino Acid
  misc_feature (14)..(15): Xaa can be any naturally occurring amino acid
CCEYCCNPXACXTXXGCY

SEQ ID NO: 1504 - protein, 18 aa, Artificial Sequence
  Synthetically generated peptide
  VARIANT (9)..(12): Xaa = Any Amino Acid
  misc_feature (14)..(14): Xaa can be any naturally occurring amino acid
  misc_feature (16)..(16): Xaa can be any naturally occurring amino acid
CCEYCCNPXACXTXGXCY

SEQ ID NO: 1505 - protein, 18 aa, Artificial Sequence
  Synthetically generated peptide
  VARIANT (9)..(12): Xaa = Any Amino Acid
  misc_feature (14)..(14): Xaa can be any naturally occurring amino acid
  misc_feature (17)..(17): Xaa can be any naturally occurring amino acid
CCEYCCNPXACXTXGCXY

SEQ ID NO: 1506 - protein, 17 aa, Artificial Sequence
  Synthetically generated peptide
  VARIANT (9)..(12): Xaa = Any Amino Acid
  misc_feature (15)..(15): Xaa can be any naturally occurring amino acid
CCEYCCNPXACXTGXCY

SEQ ID NO: 1507 - protein, 18 aa, Artificial Sequence
  Synthetically generated peptide
  VARIANT (9)..(12): Xaa = Any Amino Acid
  misc_feature (15)..(16): Xaa can be any naturally occurring amino acid
CCEYCCNPXACXTGXXCY

SEQ ID NO: 1508 - protein, 18 aa, Artificial Sequence
  Synthetically generated peptide
  VARIANT (9)..(12): Xaa = Any Amino Acid
  misc_feature (15)..(15): Xaa can be any naturally occurring amino acid
  misc_feature (17)..(17): Xaa can be any naturally occurring amino acid
CCEYCCNPXACXTGXCXY

SEQ ID NO: 1509 - protein, 17 aa, Artificial Sequence
  Synthetically generated peptide
  VARIANT (9)..(12): Xaa = Any Amino Acid
  misc_feature (16)..(16): Xaa can be any naturally occurring amino acid
CCEYCCNPXACXTGCXY

SEQ ID NO: 1510 - protein, 18 aa, Artificial Sequence
  Synthetically generated peptide
  VARIANT (9)..(12): Xaa = Any Amino Acid
  misc_feature (16)..(17): Xaa can be any naturally occurring amino acid
CCEYCCNPXACXTGCXXY

SEQ ID NO: 1511 - protein, 16 aa, Artificial Sequence
  Synthetically generated peptide
  VARIANT (9)..(13): Xaa = Any Amino Acid
CCEYCCNPXACTXGCY

SEQ ID NO: 1512 - protein, 17 aa, Artificial Sequence
  Synthetically generated peptide
  VARIANT (9)..(13): Xaa = Any Amino Acid
  misc_feature (14)..(14): Xaa can be any naturally occurring amino acid
CCEYCCNPXACTXXGCY

SEQ ID NO: 1513 - protein, 18 aa, Artificial Sequence
  Synthetically generated peptide
  VARIANT (9)..(13): Xaa = Any Amino Acid
  misc_feature (14)..(15): Xaa can be any naturally occurring amino acid
CCEYCCNPXACTXXXGCY

SEQ ID NO: 1514 - protein, 18 aa, Artificial Sequence
  Synthetically generated peptide
  VARIANT (9)..(13): Xaa = Any Amino Acid
  misc_feature (14)..(14): Xaa can be any naturally occurring amino acid
  misc_feature (16)..(16): Xaa can be any naturally occurring amino acid
CCEYCCNPXACTXXGXCY

SEQ ID NO: 1515 - protein, 18 aa, Artificial Sequence
  Synthetically generated peptide
  VARIANT (9)..(13): Xaa = Any Amino Acid
  misc_feature (14)..(14): Xaa can be any naturally occurring amino acid
  misc_feature (17)..(17): Xaa can be any naturally occurring amino acid
CCEYCCNPXACTXXGCXY

SEQ ID NO: 1516 - protein, 17 aa, Artificial Sequence
  Synthetically generated peptide
  VARIANT (9)..(13): Xaa = Any Amino Acid
  misc_feature (15)..(15): Xaa can be any naturally occurring amino acid
CCEYCCNPXACTXGXCY

SEQ ID NO: 1517 - protein, 18 aa, Artificial Sequence
  Synthetically generated peptide
  VARIANT (9)..(13): Xaa = Any Amino Acid
  misc_feature (15)..(16): Xaa can be any naturally occurring amino acid
CCEYCCNPXACTXGXXCY

SEQ ID NO: 1518 - protein, 18 aa, Artificial Sequence
  Synthetically generated peptide
  VARIANT (9)..(13): Xaa = Any Amino Acid
  misc_feature (15)..(15): Xaa can be any naturally occurring amino acid
  misc_feature (17)..(17): Xaa can be any naturally occurring amino acid
CCEYCCNPXACTXGXCXY

SEQ ID NO: 1519 - protein, 17 aa, Artificial Sequence
  Synthetically generated peptide
  VARIANT (9)..(13): Xaa = Any Amino Acid
  misc_feature (16)..(16): Xaa can be any naturally occurring amino acid
CCEYCCNPXACTXGCXY

SEQ ID NO: 1520 - protein, 18 aa, Artificial Sequence
  Synthetically generated peptide
  VARIANT (9)..(13): Xaa = Any Amino Acid
  misc_feature (16)..(17): Xaa can be any naturally occurring amino acid
CCEYCCNPXACTXGCXXY

SEQ ID NO: 1521 - protein, 16 aa, Artificial Sequence
  Synthetically generated peptide
  VARIANT (1)..(16): Xaa = Any Amino Acid
  VARIANT (9)..(14): Xaa = Any Amino Acid
CCEYCCNPXACTGXCY

SEQ ID NO: 1522 - protein, 17 aa, Artificial Sequence
  Synthetically generated peptide
  VARIANT (9)..(14): Xaa = Any Amino Acid
  misc_feature (15)..(15): Xaa can be any naturally occurring amino acid
CCEYCCNPXACTGXXCY

SEQ ID NO: 1523 - protein, 18 aa, Artificial Sequence
  Synthetically generated peptide
  VARIANT (9)..(14): Xaa = Any Amino Acid
  misc_feature (15)..(16): Xaa can be any naturally occurring amino acid
CCEYCCNPXACTGXXXCY

SEQ ID NO: 1524 - protein, 18 aa, Artificial Sequence
  Synthetically generated peptide
  VARIANT (9)..(14): Xaa = Any Amino Acid
  misc_feature (15)..(15): Xaa can be any naturally occurring amino acid
  misc_feature (17)..(17): Xaa can be any naturally occurring amino acid
CCEYCCNPXACTGXXCXY

SEQ ID NO: 1525 - protein, 17 aa, Artificial Sequence
  Synthetically generated peptide
  VARIANT (9)..(14): Xaa = Any Amino Acid
  misc_feature (16)..(16): Xaa can be any naturally occurring amino acid
CCEYCCNPXACTGXCXY

SEQ ID NO: 1526 - protein, 18 aa, Artificial Sequence
  Synthetically generated peptide
  VARIANT (9)..(14): Xaa = Any Amino Acid
  misc_feature (16)..(17): Xaa can be any naturally occurring amino acid
CCEYCCNPXACTGXCXXY

SEQ ID NO: 1527 - protein, 16 aa, Artificial Sequence
  Synthetically generated peptide
  VARIANT (9)..(15): Xaa = Any Amino Acid
CCEYCCNPXACTGCXY

SEQ ID NO: 1528 - protein, 17 aa, Artificial Sequence
  Synthetically generated peptide
  VARIANT (9)..(15): Xaa = Any Amino Acid
  misc_feature (16)..(16): Xaa can be any naturally occurring amino acid
CCEYCCNPXACTGCXXY

SEQ ID NO: 1529 - protein, 18 aa, Artificial Sequence
  Synthetically generated peptide
  VARIANT (9)..(15): Xaa = Any Amino Acid
  misc_feature (16)..(17): Xaa can be any naturally occurring amino acid
CCEYCCNPXACTGCXXXY

SEQ ID NO: 1530 - protein, 15 aa, Artificial Sequence
  Synthetically generated peptide
  VARIANT (10)..(10): Xaa = Any Amino Acid
CCEYCCNPAXCTGCY

SEQ ID NO: 1531 - protein, 16 aa, Artificial Sequence
  Synthetically generated peptide
  VARIANT (10)..(11): Xaa = Any Amino Acid
CCEYCCNPAXXCTGCY

SEQ ID NO: 1532 - protein, 17 aa, Artificial Sequence
  Synthetically generated peptide
  VARIANT (10)..(11): Xaa = Any Amino Acid
  misc_feature (12)..(12): Xaa can be any naturally occurring amino acid
CCEYCCNPAXXXCTGCY

SEQ ID NO: 1533 - protein, 18 aa, Artificial Sequence
  Synthetically generated peptide
  VARIANT (10)..(11): Xaa = Any Amino Acid
  misc_feature (12)..(13): Xaa can be any naturally occurring amino acid
CCEYCCNPAXXXXCTGCY

SEQ ID NO: 1534 - protein, 18 aa, Artificial Sequence
  Synthetically generated peptide
  VARIANT (10)..(11): Xaa = Any Amino Acid
  misc_feature (12)..(12): Xaa can be any naturally occurring amino acid
  misc_feature (14)..(14): Xaa can be any naturally occurring amino acid
CCEYCCNPAXXXCXTGCY

SEQ ID NO: 1535 - protein, 18 aa, Artificial Sequence
  Synthetically generated peptide
  VARIANT (10)..(11): Xaa = Any Amino Acid
  misc_feature (12)..(12): Xaa can be any naturally occurring amino acid
  misc_feature (15)..(15): Xaa can be any naturally occurring amino acid
CCEYCCNPAXXXCTXGCY

SEQ ID NO: 1536 - protein, 18 aa, Artificial Sequence
  Synthetically generated peptide
  VARIANT (10)..(11): Xaa = Any Amino Acid
  misc_feature (12)..(12): Xaa can be any naturally occurring amino acid
  misc_feature (16)..(16): Xaa can be any naturally occurring amino acid
CCEYCCNPAXXXCTGXCY

SEQ ID NO: 1537 - protein, 18 aa, Artificial Sequence
  Synthetically generated peptide
  VARIANT (10)..(11): Xaa = Any Amino Acid
  misc_feature (12)..(12): Xaa can be any naturally occurring amino acid
  misc_feature (17)..(17): Xaa can be any naturally occurring amino acid
CCEYCCNPAXXXCTGCXY

SEQ ID NO: 1538 - protein, 17 aa, Artificial Sequence
  Synthetically generated peptide
  VARIANT (10)..(11): Xaa = Any Amino Acid
  misc_feature (13)..(13): Xaa can be any naturally occurring amino acid
CCEYCCNPAXXCXTGCY

SEQ ID NO: 1539 - protein, 18 aa, Artificial Sequence
  Synthetically generated peptide
  VARIANT (10)..(11): Xaa = Any Amino Acid
  misc_feature (13)..(14): Xaa can be any naturally occurring amino acid
CCEYCCNPAXXCXXTGCY

SEQ ID NO: 1540 - protein, 18 aa, Artificial Sequence
  Synthetically generated peptide
  VARIANT (10)..(11): Xaa = Any Amino Acid
  misc_feature (13)..(13): Xaa can be any naturally occurring amino acid
  misc_feature (15)..(15): Xaa can be any naturally occurring amino acid
CCEYCCNPAXXCXTXGCY

SEQ ID NO: 1541 - protein, 18 aa, Artificial Sequence
  Synthetically generated peptide
  VARIANT (10)..(11): Xaa = Any Amino Acid
  misc_feature (13)..(13): Xaa can be any naturally occurring amino acid
  misc_feature (16)..(16): Xaa can be any naturally occurring amino acid
CCEYCCNPAXXCXTGXCY

SEQ ID NO: 1542 - protein, 18 aa, Artificial Sequence
  Synthetically generated peptide
  VARIANT (10)..(11): Xaa = Any Amino Acid
  misc_feature (13)..(13): Xaa can be any naturally occurring amino acid
  misc_feature (17)..(17): Xaa can be any naturally occurring amino acid
CCEYCCNPAXXCXTGCXY

SEQ ID NO: 1543 - protein, 17 aa, Artificial Sequence
  Synthetically generated peptide
  VARIANT (10)..(11): Xaa = Any Amino Acid
  misc_feature (14)..(14): Xaa can be any naturally occurring amino acid
CCEYCCNPAXXCTXGCY

SEQ ID NO: 1544 - protein, 18 aa, Artificial Sequence
  Synthetically generated peptide
  VARIANT (10)..(11): Xaa = Any Amino Acid
  misc_feature (14)..(15): Xaa can be any naturally occurring amino acid
CCEYCCNPAXXCTXXGCY

SEQ ID NO: 1545 - protein, 18 aa, Artificial Sequence
  Synthetically generated peptide
  VARIANT (10)..(11): Xaa = Any Amino Acid
  misc_feature (14)..(14): Xaa can be any naturally occurring amino acid
  misc_feature (16)..(16): Xaa can be any naturally occurring amino acid
CCEYCCNPAXXCTXGXCY

SEQ ID NO: 1546 - protein, 18 aa, Artificial Sequence
  Synthetically generated peptide
  VARIANT (10)..(11): Xaa = Any Amino Acid
  misc_feature (14)..(14): Xaa can be any naturally occurring amino acid
  misc_feature (17)..(17): Xaa can be any naturally occurring amino acid
CCEYCCNPAXXCTXGCXY

SEQ ID NO: 1547 - protein, 17 aa, Artificial Sequence
  Synthetically generated peptide
  VARIANT (10)..(11): Xaa = Any Amino Acid
  misc_feature (15)..(15): Xaa can be any naturally occurring amino acid
CCEYCCNPAXXCTGXCY

SEQ ID NO: 1548 - protein, 18 aa, Artificial Sequence
  Synthetically generated peptide
  VARIANT (10)..(11): Xaa = Any Amino Acid
  misc_feature (15)..(16): Xaa can be any naturally occurring amino acid
CCEYCCNPAXXCTGXXCY

SEQ ID NO: 1549 - protein, 18 aa, Artificial Sequence
  Synthetically generated peptide
  VARIANT (10)..(11): Xaa = Any Amino Acid
  misc_feature (15)..(15): Xaa can be any naturally occurring amino acid
  misc_feature (17)..(17): Xaa can be any naturally occurring amino acid
CCEYCCNPAXXCTGXCXY

SEQ ID NO: 1550 - protein, 17 aa, Artificial Sequence
  Synthetically generated peptide
  VARIANT (10)..(11): Xaa = Any Amino Acid
  misc_feature (16)..(16): Xaa can be any naturally occurring amino acid
CCEYCCNPAXXCTGCXY

SEQ ID NO: 1551 - protein, 18 aa, Artificial Sequence
  Synthetically generated peptide
  VARIANT (10)..(11): Xaa = Any Amino Acid
  misc_feature (16)..(17): Xaa can be any naturally occurring amino acid
CCEYCCNPAXXCTGCXXY

SEQ ID NO: 1552 - protein, 16 aa, Artificial Sequence
  Synthetically generated peptide
  VARIANT (10)..(12): Xaa = Any Amino Acid
CCEYCCNPAXCXTGCY

SEQ ID NO: 1553 - protein, 17 aa, Artificial Sequence
  Synthetically generated peptide
  VARIANT (10)..(12): Xaa = Any Amino Acid
  misc_feature (13)..(13): Xaa can be any naturally occurring amino acid
CCEYCCNPAXCXXTGCY

SEQ ID NO: 1554 - protein, 18 aa, Artificial Sequence
  Synthetically generated peptide
  VARIANT (10)..(12): Xaa = Any Amino Acid
  misc_feature (13)..(14): Xaa can be any naturally occurring amino acid
CCEYCCNPAXCXXXTGCY

SEQ ID NO: 1555 - protein, 18 aa, Artificial Sequence
  Synthetically generated peptide
  VARIANT (10)..(12): Xaa = Any Amino Acid
  misc_feature (13)..(13): Xaa can be any naturally occurring amino acid
  misc_feature (15)..(15): Xaa can be any naturally occurring amino acid
CCEYCCNPAXCXXTXGCY

SEQ ID NO: 1556 - protein, 18 aa, Artificial Sequence
  Synthetically generated peptide
  VARIANT (10)..(12): Xaa = Any Amino Acid
  misc_feature (13)..(13): Xaa can be any naturally occurring amino acid
  misc_feature (16)..(16): Xaa can be any naturally occurring amino acid
CCEYCCNPAXCXXTGXCY

SEQ ID NO: 1557 - protein, 18 aa, Artificial Sequence
  Synthetically generated peptide
  VARIANT (10)..(12): Xaa = Any Amino Acid
  misc_feature (13)..(13): Xaa can be any naturally occurring amino acid
  misc_feature (17)..(17): Xaa can be any naturally occurring amino acid
CCEYCCNPAXCXXTGCXY

SEQ ID NO: 1558 - protein, 17 aa, Artificial Sequence
  Synthetically generated peptide
  VARIANT (10)..(12): Xaa = Any Amino Acid
  misc_feature (14)..(14): Xaa can be any naturally occurring amino acid
CCEYCCNPAXCXTXGCY

SEQ ID NO: 1559 - protein, 18 aa, Artificial Sequence
  Synthetically generated peptide
  VARIANT (10)..(12): Xaa = Any Amino Acid
  misc_feature (14)..(15): Xaa can be any naturally occurring amino acid
CCEYCCNPAXCXTXXGCY

SEQ ID NO: 1560 - protein, 18 aa, Artificial Sequence
  Synthetically generated peptide
  VARIANT (10)..(12): Xaa = Any Amino Acid
  misc_feature (14)..(14): Xaa can be any naturally occurring amino acid
  misc_feature (16)..(16): Xaa can be any naturally occurring amino acid
CCEYCCNPAXCXTXGXCY

SEQ ID NO: 1561 - protein, 18 aa, Artificial Sequence
  Synthetically generated peptide
  VARIANT (10)..(12): Xaa = Any Amino Acid
  misc_feature (14)..(14): Xaa can be any naturally occurring amino acid
  misc_feature (17)..(17): Xaa can be any naturally occurring amino acid
CCEYCCNPAXCXTXGCXY

SEQ ID NO: 1562 - protein, 17 aa, Artificial Sequence
  Synthetically generated peptide
  VARIANT (10)..(12): Xaa = Any Amino Acid
  misc_feature (15)..(15): Xaa can be any naturally occurring amino acid
CCEYCCNPAXCXTGXCY

SEQ ID NO: 1563 - protein, 18 aa, Artificial Sequence
  Synthetically generated peptide
  VARIANT (10)..(12): Xaa = Any Amino Acid
  misc_feature (15)..(16): Xaa can be any naturally occurring amino acid
CCEYCCNPAXCXTGXXCY

SEQ ID NO: 1564 - protein, 18 aa, Artificial Sequence
  Synthetically generated peptide
  VARIANT (10)..(12): Xaa = Any Amino Acid
  misc_feature (15)..(15): Xaa can be any naturally occurring amino acid
  misc_feature (17)..(17): Xaa can be any naturally occurring amino acid
CCEYCCNPAXCXTGXCXY

SEQ ID NO: 1565 - protein, 17 aa, Artificial Sequence
  Synthetically generated peptide
  VARIANT (10)..(12): Xaa = Any Amino Acid
  misc_feature (16)..(16): Xaa can be any naturally occurring amino acid
CCEYCCNPAXCXTGCXY

SEQ ID NO: 1566 - protein, 18 aa, Artificial Sequence
  Synthetically generated peptide
  VARIANT (10)..(12): Xaa = Any Amino Acid
  misc_feature (16)..(17): Xaa can be any naturally occurring amino acid
CCEYCCNPAXCXTGCXXY

SEQ ID NO: 1567 - protein, 16 aa, Artificial Sequence
  Synthetically generated peptide
  VARIANT (10)..(13): Xaa = Any Amino Acid
CCEYCCNPAXCTXGCY

SEQ ID NO: 1568 - protein, 17 aa, Artificial Sequence
  Synthetically generated peptide
  VARIANT (10)..(13): Xaa = Any Amino Acid
  misc_feature (14)..(14): Xaa can be any naturally occurring amino acid
CCEYCCNPAXCTXXGCY

SEQ ID NO: 1569 - protein, 18 aa, Artificial Sequence
  Synthetically generated peptide
  VARIANT (10)..(13): Xaa = Any Amino Acid
  misc_feature (14)..(15): Xaa can be any naturally occurring amino acid
CCEYCCNPAXCTXXXGCY

SEQ ID NO: 1570 - protein, 18 aa, Artificial Sequence
  Synthetically generated peptide
  VARIANT (10)..(13): Xaa = Any Amino Acid
  misc_feature (14)..(14): Xaa can be any naturally occurring amino acid
  misc_feature (16)..(16): Xaa can be any naturally occurring amino acid
CCEYCCNPAXCTXXGXCY

SEQ ID NO: 1571 - protein, 18 aa, Artificial Sequence
  Synthetically generated peptide
  VARIANT (10)..(13): Xaa = Any Amino Acid
  misc_feature (14)..(14): Xaa can be any naturally occurring amino acid
  misc_feature (17)..(17): Xaa can be any naturally occurring amino acid
CCEYCCNPAXCTXXGCXY

SEQ ID NO: 1572 - protein, 17 aa, Artificial Sequence
  Synthetically generated peptide
  VARIANT (10)..(13): Xaa = Any Amino Acid
  misc_feature (15)..(15): Xaa can be any naturally occurring amino acid
CCEYCCNPAXCTXGXCY

SEQ ID NO: 1573 - protein, 18 aa, Artificial Sequence
  Synthetically generated peptide
  VARIANT (10)..(13): Xaa = Any Amino Acid
  misc_feature (15)..(16): Xaa can be any naturally occurring amino acid
CCEYCCNPAXCTXGXXCY

SEQ ID NO: 1574 - protein, 18 aa, Artificial Sequence
  Synthetically generated peptide
  VARIANT (10)..(13): Xaa = Any Amino Acid
  misc_feature (15)..(15): Xaa can be any naturally occurring amino acid
  misc_feature (17)..(17): Xaa can be any naturally occurring amino acid
CCEYCCNPAXCTXGXCXY

SEQ ID NO: 1575 - protein, 17 aa, Artificial Sequence
  Synthetically generated peptide
  VARIANT (10)..(13): Xaa = Any Amino Acid
  misc_feature (16)..(16): Xaa can be any naturally occurring amino acid
CCEYCCNPAXCTXGCXY

SEQ ID NO: 1576 - protein, 18 aa, Artificial Sequence
  Synthetically generated peptide
  VARIANT (10)..(13): Xaa = Any Amino Acid
  misc_feature (16)..(17): Xaa can be any naturally occurring amino acid
CCEYCCNPAXCTXGCXXY

SEQ ID NO: 1577 - protein, 16 aa, Artificial Sequence
  Synthetically generated peptide
  VARIANT (10)..(14): Xaa = Any Amino Acid
CCEYCCNPAXCTGXCY

SEQ ID NO: 1578 - protein, 17 aa, Artificial Sequence
  Synthetically generated peptide
  VARIANT (10)..(14): Xaa = Any Amino Acid
  misc_feature (15)..(15): Xaa can be any naturally occurring amino acid
CCEYCCNPAXCTGXXCY

SEQ ID NO: 1579 - protein, 18 aa, Artificial Sequence
  Synthetically generated peptide
  VARIANT (10)..(14): Xaa = Any Amino Acid
  misc_feature (15)..(16): Xaa can be any naturally occurring amino acid
CCEYCCNPAXCTGXXXCY

SEQ ID NO: 1580 - protein, 18 aa, Artificial Sequence
  Synthetically generated peptide
  VARIANT (10)..(14): Xaa = Any Amino Acid
  misc_feature (15)..(15): Xaa can be any naturally occurring amino acid
  misc_feature (17)..(17): Xaa can be any naturally occurring amino acid
CCEYCCNPAXCTGXXCXY

SEQ ID NO: 1581 - protein, 17 aa, Artificial Sequence
  Synthetically generated peptide
  VARIANT (10)..(14): Xaa = Any Amino Acid
  misc_feature (16)..(16): Xaa can be any naturally occurring amino acid
CCEYCCNPAXCTGXCXY

SEQ ID NO: 1582 - protein, 18 aa, Artificial Sequence
  Synthetically generated peptide
  VARIANT (10)..(14): Xaa = Any Amino Acid
  misc_feature (16)..(17): Xaa can be any naturally occurring amino acid
CCEYCCNPAXCTGXCXXY

SEQ ID NO: 1583 - protein, 16 aa, Artificial Sequence
  Synthetically generated peptide
  VARIANT (10)..(15): Xaa = Any Amino Acid
CCEYCCNPAXCTGCXY

SEQ ID NO: 1584 - protein, 17 aa, Artificial Sequence
  Synthetically generated peptide
  VARIANT (10)..(15): Xaa = Any Amino Acid
  misc_feature (16)..(16): Xaa can be any naturally occurring amino acid
CCEYCCNPAXCTGCXXY

SEQ ID NO: 1585 - protein, 18 aa, Artificial Sequence
  Synthetically generated peptide
  VARIANT (10)..(15): Xaa = Any Amino Acid
  misc_feature (16)..(17): Xaa can be any naturally occurring amino acid
CCEYCCNPAXCTGCXXXY

SEQ ID NO: 1586 - protein, 15 aa, Artificial Sequence
  Synthetically generated peptide
  VARIANT (11)..(11): Xaa = Any Amino Acid
CCEYCCNPACXTGCY

SEQ ID NO: 1587 - protein, 16 aa, Artificial Sequence
  Synthetically generated peptide
  VARIANT (11)..(12): Xaa = Any Amino Acid
CCEYCCNPACXXTGCY

SEQ ID NO: 1588 - protein, 17 aa, Artificial Sequence
  Synthetically generated peptide
  VARIANT (11)..(12): Xaa = Any Amino Acid
  misc_feature (13)..(13): Xaa can be any naturally occurring amino acid
CCEYCCNPACXXXTGCY

SEQ ID NO: 1589 - protein, 18 aa, Artificial Sequence
  Synthetically generated peptide
  VARIANT (11)..(12): Xaa = Any Amino Acid
  misc_feature (13)..(14): Xaa can be any naturally occurring amino acid
CCEYCCNPACXXXXTGCY

SEQ ID NO: 1590 - protein, 18 aa, Artificial Sequence
  Synthetically generated peptide
  VARIANT (11)..(12): Xaa = Any Amino Acid
  misc_feature (13)..(13): Xaa can be any naturally occurring amino acid
  misc_feature (15)..(15): Xaa can be any naturally occurring amino acid
CCEYCCNPACXXXTXGCY

SEQ ID NO: 1591 - protein, 18 aa, Artificial Sequence
  Synthetically generated peptide
  VARIANT (11)..(12): Xaa = Any Amino Acid
  misc_feature (13)..(13): Xaa can be any naturally occurring amino acid
  misc_feature (16)..(16): Xaa can be any naturally occurring amino acid
CCEYCCNPACXXXTGXCY

SEQ ID NO: 1592 - protein, 18 aa, Artificial Sequence
  Synthetically generated peptide
  VARIANT (11)..(12): Xaa = Any Amino Acid
  misc_feature (13)..(13): Xaa can be any naturally occurring amino acid
  misc_feature (17)..(17): Xaa can be any naturally occurring amino acid
CCEYCCNPACXXXTGCXY

SEQ ID NO: 1593 - protein, 17 aa, Artificial Sequence
  Synthetically generated peptide
  VARIANT (11)..(12): Xaa = Any Amino Acid
  misc_feature (14)..(14): Xaa can be any naturally occurring amino acid
CCEYCCNPACXXTXGCY

SEQ ID NO: 1594 - protein, 18 aa, Artificial Sequence
  Synthetically generated peptide
  VARIANT (11)..(12): Xaa = Any Amino Acid
  misc_feature (14)..(15): Xaa can be any naturally occurring amino acid
CCEYCCNPACXXTXXGCY

SEQ ID NO: 1595 - protein, 18 aa, Artificial Sequence
  Synthetically generated peptide
  VARIANT (11)..(12): Xaa = Any Amino Acid
  misc_feature (14)..(14): Xaa can be any naturally occurring amino acid
  misc_feature (16)..(16): Xaa can be any naturally occurring amino acid
CCEYCCNPACXXTXGXCY

SEQ ID NO: 1596 - protein, 18 aa, Artificial Sequence
  Synthetically generated peptide
  VARIANT (11)..(12): Xaa = Any Amino Acid
  misc_feature (14)..(14): Xaa can be any naturally occurring amino acid
  misc_feature (17)..(17): Xaa can be any naturally occurring amino acid
CCEYCCNPACXXTXGCXY

SEQ ID NO: 1597 - protein, 17 aa, Artificial Sequence
  Synthetically generated peptide
  VARIANT (11)..(12): Xaa = Any Amino Acid
  misc_feature (15)..(15): Xaa can be any naturally occurring amino acid
CCEYCCNPACXXTGXCY

SEQ ID NO: 1598 - protein, 18 aa, Artificial Sequence
  Synthetically generated peptide
  VARIANT (11)..(12): Xaa = Any Amino Acid
  misc_feature (15)..(16): Xaa can be any naturally occurring amino acid
CCEYCCNPACXXTGXXCY

SEQ ID NO: 1599 - protein, 18 aa, Artificial Sequence
  Synthetically generated peptide
  VARIANT (11)..(12): Xaa = Any Amino Acid
  misc_feature (15)..(15): Xaa can be any naturally occurring amino acid
  misc_feature (17)..(17): Xaa can be any naturally occurring amino acid
CCEYCCNPACXXTGXCXY

SEQ ID NO: 1600 - protein, 17 aa, Artificial Sequence
  Synthetically generated peptide
  VARIANT (11)..(12): Xaa = Any Amino Acid
  misc_feature (16)..(16): Xaa can be any naturally occurring amino acid
CCEYCCNPACXXTGCXY

SEQ ID NO: 1601 - protein, 18 aa, Artificial Sequence
  Synthetically generated peptide
  VARIANT (11)..(12): Xaa = Any Amino Acid
  misc_feature (16)..(17): Xaa can be any naturally occurring amino acid
CCEYCCNPACXXTGCXXY

SEQ ID NO: 1602 - protein, 16 aa, Artificial Sequence
  Synthetically generated peptide
  VARIANT (11)..(13): Xaa = Any Amino Acid
CCEYCCNPACXTXGCY

SEQ ID NO: 1603 - protein, 17 aa, Artificial Sequence
  Synthetically generated peptide
  VARIANT (11)..(13): Xaa = Any Amino Acid
  misc_feature (14)..(14): Xaa can be any naturally occurring amino acid
CCEYCCNPACXTXXGCY

SEQ ID NO: 1604 - protein, 18 aa, Artificial Sequence
  Synthetically generated peptide
  VARIANT (11)..(13): Xaa = Any Amino Acid
  misc_feature (14)..(15): Xaa can be any naturally occurring amino acid
CCEYCCNPACXTXXXGCY

SEQ ID NO: 1605 - protein, 18 aa, Artificial Sequence
  Synthetically generated peptide
  VARIANT (11)..(13): Xaa = Any Amino Acid
  misc_feature (14)..(14): Xaa can be any naturally occurring amino acid
  misc_feature (16)..(16): Xaa can be any naturally occurring amino acid
CCEYCCNPACXTXXGXCY

SEQ ID NO: 1606 - protein, 18 aa, Artificial Sequence
  Synthetically generated peptide
  VARIANT (11)..(13): Xaa = Any Amino Acid
  misc_feature (14)..(14): Xaa can be any naturally occurring amino acid
  misc_feature (17)..(17): Xaa can be any naturally occurring amino acid
CCEYCCNPACXTXXGCXY

SEQ ID NO: 1607 - protein, 17 aa, Artificial Sequence
  Synthetically generated peptide
  VARIANT (11)..(13): Xaa = Any Amino Acid
  misc_feature (15)..(15): Xaa can be any naturally occurring amino acid
CCEYCCNPACXTXGXCY

SEQ ID NO: 1608 - protein, 18 aa, Artificial Sequence
  Synthetically generated peptide
  VARIANT (11)..(13): Xaa = Any Amino Acid
  misc_feature (15)..(16): Xaa can be any naturally occurring amino acid
CCEYCCNPACXTXGXXCY

SEQ ID NO: 1609 - protein, 18 aa, Artificial Sequence
  Synthetically generated peptide
  VARIANT (11)..(13): Xaa = Any Amino Acid
  misc_feature (15)..(15): Xaa can be any naturally occurring amino acid
  misc_feature (17)..(17): Xaa can be any naturally occurring amino acid
CCEYCCNPACXTXGXCXY

SEQ ID NO: 1610 - protein, 17 aa, Artificial Sequence
  Synthetically generated peptide
  VARIANT (11)..(13): Xaa = Any Amino Acid
  misc_feature (16)..(16): Xaa can be any naturally occurring amino acid
CCEYCCNPACXTXGCXY

SEQ ID NO: 1611 - protein, 18 aa, Artificial Sequence
  Synthetically generated peptide
  VARIANT (11)..(13): Xaa = Any Amino Acid
  misc_feature (16)..(17): Xaa can be any naturally occurring amino acid
CCEYCCNPACXTXGCXXY

SEQ ID NO: 1612 - protein, 16 aa, Artificial Sequence
  Synthetically generated peptide
  VARIANT (11)..(14): Xaa = Any Amino Acid
CCEYCCNPACXTGXCY

SEQ ID NO: 1613 - protein, 17 aa, Artificial Sequence
  Synthetically generated peptide
  VARIANT (11)..(14): Xaa = Any Amino Acid
  misc_feature (15)..(15): Xaa can be any naturally occurring amino acid
CCEYCCNPACXTGXXCY

SEQ ID NO: 1614 - protein, 18 aa, Artificial Sequence
  Synthetically generated peptide
  VARIANT (11)..(14): Xaa = Any Amino Acid
  misc_feature (15)..(16): Xaa can be any naturally occurring amino acid
CCEYCCNPACXTGXXXCY

SEQ ID NO: 1615 - protein, 18 aa, Artificial Sequence
  Synthetically generated peptide
  VARIANT (11)..(14): Xaa = Any Amino Acid
  misc_feature (15)..(15): Xaa can be any naturally occurring amino acid
  misc_feature (17)..(17): Xaa can be any naturally occurring amino acid
CCEYCCNPACXTGXXCXY

SEQ ID NO: 1616 - protein, 17 aa, Artificial Sequence
  Synthetically generated peptide
  VARIANT (11)..(14): Xaa = Any Amino Acid
  misc_feature (16)..(16): Xaa can be any naturally occurring amino acid
CCEYCCNPACXTGXCXY

SEQ ID NO: 1617 - protein, 18 aa, Artificial Sequence
  Synthetically generated peptide
  VARIANT (11)..(14): Xaa = Any Amino Acid
  misc_feature (16)..(17): Xaa can be any naturally occurring amino acid
CCEYCCNPACXTGXCXXY

SEQ ID NO: 1618 - protein, 16 aa, Artificial Sequence
  Synthetically generated peptide
  VARIANT (11)..(15): Xaa = Any Amino Acid
CCEYCCNPACXTGCXY

SEQ ID NO: 1619 - protein, 17 aa, Artificial Sequence
  Synthetically generated peptide
  VARIANT (11)..(15): Xaa = Any Amino Acid
  misc_feature (16)..(16): Xaa can be any naturally occurring amino acid
CCEYCCNPACXTGCXXY

SEQ ID NO: 1620 - protein, 18 aa, Artificial Sequence
  Synthetically generated peptide
  VARIANT (11)..(15): Xaa = Any Amino Acid
  misc_feature (16)..(17): Xaa can be any naturally occurring amino acid
CCEYCCNPACXTGCXXXY

SEQ ID NO: 1621 - protein, 15 aa, Artificial Sequence
  Synthetically generated peptide
  VARIANT (12)..(12): Xaa = Any Amino Acid
CCEYCCNPACTXGCY

SEQ ID NO: 1622 - protein, 16 aa, Artificial Sequence
  Synthetically generated peptide
  VARIANT (12)..(13): Xaa = Any Amino Acid
CCEYCCNPACTXXGCY

SEQ ID NO: 1623 - protein, 17 aa, Artificial Sequence
  Synthetically generated peptide
  VARIANT (12)..(13): Xaa = Any Amino Acid
  misc_feature (14)..(14): Xaa can be any naturally occurring amino acid
CCEYCCNPACTXXXGCY

SEQ ID NO: 1624 - protein, 18 aa, Artificial Sequence
  Synthetically generated peptide
  VARIANT (12)..(13): Xaa = Any Amino Acid
  misc_feature (14)..(15): Xaa can be any naturally occurring amino acid
CCEYCCNPACTXXXXGCY

SEQ ID NO: 1625 - protein, 18 aa, Artificial Sequence
  Synthetically generated peptide
  VARIANT (12)..(13): Xaa = Any Amino Acid
  misc_feature (14)..(14): Xaa can be any naturally occurring amino acid
  misc_feature (16)..(16): Xaa can be any naturally occurring amino acid
CCEYCCNPACTXXXGXCY

SEQ ID NO: 1626 - protein, 18 aa, Artificial Sequence
  Synthetically generated peptide
  VARIANT (12)..(13): Xaa = Any Amino Acid
  misc_feature (14)..(14): Xaa can be any naturally occurring amino acid
  misc_feature (17)..(17): Xaa can be any naturally occurring amino acid
CCEYCCNPACTXXXGCXY

SEQ ID NO: 1627 - protein, 17 aa, Artificial Sequence
  Synthetically generated peptide
  VARIANT (12)..(13): Xaa = Any Amino Acid
  misc_feature (15)..(15): Xaa can be any naturally occurring amino acid
CCEYCCNPACTXXGXCY

SEQ ID NO: 1628 - protein, 18 aa, Artificial Sequence
  Synthetically generated peptide
  VARIANT (12)..(13): Xaa = Any Amino Acid
  misc_feature (15)..(16): Xaa can be any naturally occurring amino acid
CCEYCCNPACTXXGXXCY

SEQ ID NO: 1629 - protein, 18 aa, Artificial Sequence
  Synthetically generated peptide
  VARIANT (12)..(13): Xaa = Any Amino Acid
  misc_feature (15)..(15): Xaa can be any naturally occurring amino acid
  misc_feature (17)..(17): Xaa can be any naturally occurring amino acid
CCEYCCNPACTXXGXCXY

SEQ ID NO: 1630 - protein, 17 aa, Artificial Sequence
  Synthetically generated peptide
  VARIANT (12)..(13): Xaa = Any Amino Acid
  misc_feature (16)..(16): Xaa can be any naturally occurring amino acid
CCEYCCNPACTXXGCXY

SEQ ID NO: 1631 - protein, 18 aa, Artificial Sequence
  Synthetically generated peptide
  VARIANT (12)..(13): Xaa = Any Amino Acid
  misc_feature (16)..(17): Xaa can be any naturally occurring amino acid
CCEYCCNPACTXXGCXXY

SEQ ID NO: 1632 - protein, 16 aa, Artificial Sequence
  Synthetically generated peptide
  VARIANT (12)..(14): Xaa = Any Amino Acid
CCEYCCNPACTXGXCY

SEQ ID NO: 1633 - protein, 17 aa, Artificial Sequence
  Synthetically generated peptide
  VARIANT (12)..(14): Xaa = Any Amino Acid
  misc_feature (15)..(15): Xaa can be any naturally occurring amino acid
CCEYCCNPACTXGXXCY

SEQ ID NO: 1634 - protein, 18 aa, Artificial Sequence
  Synthetically generated peptide
  VARIANT (12)..(14): Xaa = Any Amino Acid
  misc_feature (15)..(16): Xaa can be any naturally occurring amino acid
CCEYCCNPACTXGXXXCY

SEQ ID NO: 1635 - protein, 18 aa, Artificial Sequence
  Synthetically generated peptide
  VARIANT (12)..(14): Xaa = Any Amino Acid
  misc_feature (15)..(15): Xaa can be any naturally occurring amino acid
  misc_feature (17)..(17): Xaa can be any naturally occurring amino acid
CCEYCCNPACTXGXXCXY

SEQ ID NO: 1636 - protein, 17 aa, Artificial Sequence
  Synthetically generated peptide
  VARIANT (12)..(14): Xaa = Any Amino Acid
  misc_feature (16)..(16): Xaa can be any naturally occurring amino acid
CCEYCCNPACTXGXCXY

SEQ ID NO: 1637 - protein, 18 aa, Artificial Sequence
  Synthetically generated peptide
  VARIANT (12)..(14): Xaa = Any Amino Acid
  misc_feature (16)..(17): Xaa can be any naturally occurring amino acid
CCEYCCNPACTXGXCXXY

SEQ ID NO: 1638 - protein, 16 aa, Artificial Sequence
  Synthetically generated peptide
  VARIANT (12)..(15): Xaa = Any Amino Acid
CCEYCCNPACTXGCXY

SEQ ID NO: 1639 - protein, 17 aa, Artificial Sequence
  Synthetically generated peptide
  VARIANT (12)..(15): Xaa = Any Amino Acid
  misc_feature (16)..(16): Xaa can be any naturally occurring amino acid
CCEYCCNPACTXGCXXY

SEQ ID NO: 1640 - protein, 18 aa, Artificial Sequence
  Synthetically generated peptide
  VARIANT (12)..(15): Xaa = Any Amino Acid
  misc_feature (16)..(17): Xaa can be any naturally occurring amino acid
CCEYCCNPACTXGCXXXY

SEQ ID NO: 1641 - protein, 15 aa, Artificial Sequence
  Synthetically generated peptide
  VARIANT (13)..(13): Xaa = Any Amino Acid
CCEYCCNPACTGXCY

SEQ ID NO: 1642 - protein, 16 aa, Artificial Sequence
  Synthetically generated peptide
  VARIANT (13)..(14): Xaa = Any Amino Acid
CCEYCCNPACTGXXCY

SEQ ID NO: 1643 - protein, 17 aa, Artificial Sequence
  Synthetically generated peptide
  VARIANT (13)..(14): Xaa = Any Amino Acid
  misc_feature (15)..(15): Xaa can be any naturally occurring amino acid
CCEYCCNPACTGXXXCY

SEQ ID NO: 1644 - protein, 18 aa, Artificial Sequence
  Synthetically generated peptide
  VARIANT (13)..(14): Xaa = Any Amino Acid
  misc_feature (15)..(16): Xaa can be any naturally occurring amino acid
CCEYCCNPACTGXXXXCY

SEQ ID NO: 1645 - protein, 18 aa, Artificial Sequence
  Synthetically generated peptide
  VARIANT (13)..(14): Xaa = Any Amino Acid
  misc_feature (15)..(15): Xaa can be any naturally occurring amino acid
  misc_feature (17)..(17): Xaa can be any naturally occurring amino acid
CCEYCCNPACTGXXXCXY

SEQ ID NO: 1646 - protein, 17 aa, Artificial Sequence
  Synthetically generated peptide
  VARIANT (13)..(14): Xaa = Any Amino Acid
  misc_feature (16)..(16): Xaa can be any naturally occurring amino acid
CCEYCCNPACTGXXCXY

SEQ ID NO: 1647 - protein, 18 aa, Artificial Sequence
  Synthetically generated peptide
  VARIANT (13)..(14): Xaa = Any Amino Acid
  misc_feature (16)..(17): Xaa can be any naturally occurring amino acid
CCEYCCNPACTGXXCXXY

SEQ ID NO: 1648 - protein, 16 aa, Artificial Sequence
  Synthetically generated peptide
  VARIANT (13)..(15): Xaa = Any Amino Acid
CCEYCCNPACTGXCXY

SEQ ID NO: 1649 - protein, 17 aa, Artificial Sequence
  Synthetically generated peptide
  VARIANT (13)..(15): Xaa = Any Amino Acid
  misc_feature (16)..(16): Xaa can be any naturally occurring amino acid
CCEYCCNPACTGXCXXY

SEQ ID NO: 1650 - protein, 18 aa, Artificial Sequence
  Synthetically generated peptide
  VARIANT (13)..(15): Xaa = Any Amino Acid
  misc_feature (16)..(17): Xaa can be any naturally occurring amino acid
CCEYCCNPACTGXCXXXY

SEQ ID NO: 1651 - protein, 15 aa, Artificial Sequence
  Synthetically generated peptide
  VARIANT (14)..(14): Xaa = Any Amino Acid
CCEYCCNPACTGCXY

SEQ ID NO: 1652 - protein, 16 aa, Artificial Sequence
  Synthetically generated peptide
  VARIANT (14)..(15): Xaa = Any Amino Acid
CCEYCCNPACTGCXXY

SEQ ID NO: 1653 - protein, 17 aa, Artificial Sequence
  Synthetically generated peptide
  VARIANT (14)..(15): Xaa = Any Amino Acid
  misc_feature (16)..(16): Xaa can be any naturally occurring amino acid
CCEYCCNPACTGCXXXY

SEQ ID NO: 1654 - protein, 18 aa, Artificial Sequence
  Synthetically generated peptide
  VARIANT (14)..(15): Xaa = Any Amino Acid
  misc_feature (16)..(17): Xaa can be any naturally occurring amino acid
CCEYCCNPACTGCXXXXY

SEQ ID NO: 1655 - DNA, 42 bp, Artificial Sequence
  Synthetically generated oligonucleotide
cacaccatatgaagaaatcaatattatttatttttctttctg

SEQ ID NO: 1656 - DNA, 46 bp, Artificial Sequence
  Synthetically generated oligonucleotide
cacacctcgagttaggtctccatgctttcaggaccacttttattac

SEQ ID NO: 1657 - DNA, 69 bp, Artificial Sequence
  Synthetically generated oligonucleotide
gcatgaatagtagcaattactgctgtgaattgtgttgtaatcctgcttgtaccgggtgctattaataac

SEQ ID NO: 1658 - DNA, 69 bp, Artificial Sequence
  Synthetically generated oligonucleotide
tcgagttattaatagcacccggtacaagcaggattacaacacaattcacagcagtaattgctactattc

SEQ ID NO: 1659 - DNA, 69 bp, Artificial Sequence
  Synthetically generated oligonucleotide
gcatgaatagtagcaattactgctgtgaatattgttgtaatcctgcttgtaccgggtgctattaataac

SEQ ID NO: 1660 - DNA, 69 bp, Artificial Sequence
  Synthetically generated oligonucleotide
tcgagttattaatagcacccggtacaagcaggattacaacaatattcacagcagtaattgctactattc

SEQ ID NO: 1661 - protein, 5 aa, Artificial Sequence
  Synthetically generated peptide
QHNPR

SEQ ID NO: 1662 - protein, 6 aa, Artificial Sequence
  Synthetically generated peptide
VQHNPR

SEQ ID NO: 1663 - protein, 7 aa, Artificial Sequence
  Synthetically generated peptide
VRQHNPR

SEQ ID NO: 1664 - protein, 8 aa, Artificial Sequence
  Synthetically generated peptide
VRGQHNPR

SEQ ID NO: 1665 - protein, 9 aa, Artificial Sequence
  Synthetically generated peptide
VRGPQHNPR

SEQ ID NO: 1666 - protein, 10 aa, Artificial Sequence
  Synthetically generated peptide
VRGPRQHNPR

SEQ ID NO: 1667 - protein, 11 aa, Artificial Sequence
  Synthetically generated peptide
VRGPRRQHNPR

SEQ ID NO: 1668 - protein, 6 aa, Artificial Sequence
  Synthetically generated peptide
RQHNPR

SEQ ID NO: 1669 - protein, 14 aa, Artificial Sequence
  Synthetically generated peptide
CCELCCAPACTGCY

SEQ ID NO: 1670 - protein, 14 aa, Artificial Sequence
  Synthetically generated peptide
CCELCCVPACTGCY

SEQ ID NO: 1671 - protein, 14 aa, Artificial Sequence
  Synthetically generated peptide
CCELCCLPACTGCY

SEQ ID NO: 1672 - protein, 14 aa, Artificial Sequence
  Synthetically generated peptide
CCELCCIPACTGCY

SEQ ID NO: 1673 - protein, 14 aa, Artificial Sequence
  Synthetically generated peptide
CCELCCPPACTGCY

SEQ ID NO: 1674 - protein, 14 aa, Artificial Sequence
  Synthetically generated peptide
CCELCCMPACTGCY

SEQ ID NO: 1675 - protein, 14 aa, Artificial Sequence
  Synthetically generated peptide
CCELCCFPACTGCY

SEQ ID NO: 1676 - protein, 14 aa, Artificial Sequence
  Synthetically generated peptide
CCELCCWPACTGCY

SEQ ID NO: 1677 - protein, 14 aa, Artificial Sequence
  Synthetically generated peptide
CCELCCGPACTGCY

SEQ ID NO: 1678 - protein, 14 aa, Artificial Sequence
  Synthetically generated peptide
CCELCCSPACTGCY

SEQ ID NO: 1679 - protein, 14 aa, Artificial Sequence
  Synthetically generated peptide
CCELCCTPACTGCY

SEQ ID NO: 1680 - protein, 14 aa, Artificial Sequence
  Synthetically generated peptide
CCELCCCPACTGCY

SEQ ID NO: 1681 - protein, 14 aa, Artificial Sequence
  Synthetically generated peptide
CCELCCQPACTGCY

SEQ ID NO: 1682 - protein, 14 aa, Artificial Sequence
  Synthetically generated peptide
CCELCCYPACTGCY

SEQ ID NO: 1683 - protein, 14 aa, Artificial Sequence
  Synthetically generated peptide
CCELCCDPACTGCY

SEQ ID NO: 1684 - protein, 14 aa, Artificial Sequence
  Synthetically generated peptide
CCELCCEPACTGCY

SEQ ID NO: 1685 - protein, 14 aa, Artificial Sequence
  Synthetically generated peptide
CCELCCKPACTGCY

SEQ ID NO: 1686 - protein, 14 aa, Artificial Sequence
  Synthetically generated peptide
CCELCCRPACTGCY

SEQ ID NO: 1687 - protein, 14 aa, Artificial Sequence
  Synthetically generated peptide
CCELCCHPACTGCY

SEQ ID NO: 1688 - protein, 14 aa, Artificial Sequence
  Synthetically generated peptide
CCEYCCAPACTGCY

SEQ ID NO: 1689 - protein, 14 aa, Artificial Sequence
  Synthetically generated peptide
CCEYCCVPACTGCY

SEQ ID NO: 1690 - protein, 14 aa, Artificial Sequence
  Synthetically generated peptide
CCEYCCLPACTGCY

SEQ ID NO: 1691 - protein, 14 aa, Artificial Sequence
  Synthetically generated peptide
CCEYCCIPACTGCY

SEQ ID NO: 1692 - protein, 14 aa, Artificial Sequence
  Synthetically generated peptide
CCEYCCPPACTGCY

SEQ ID NO: 1693 - protein, 14 aa, Artificial Sequence
  Synthetically generated peptide
CCEYCCMPACTGCY

SEQ ID NO: 1694 - protein, 14 aa, Artificial Sequence
  Synthetically generated peptide
CCEYCCFPACTGCY

SEQ ID NO: 1695 - protein, 14 aa, Artificial Sequence
  Synthetically generated peptide
CCEYCCWPACTGCY

SEQ ID NO: 1696 - protein, 14 aa, Artificial Sequence
  Synthetically generated peptide
CCEYCCGPACTGCY

SEQ ID NO: 1697 - protein, 14 aa, Artificial Sequence
  Synthetically generated peptide
CCEYCCSPACTGCY

SEQ ID NO: 1698 - protein, 14 aa, Artificial Sequence
  Synthetically generated peptide
CCEYCCTPACTGCY

SEQ ID NO: 1699 - protein, 14 aa, Artificial Sequence
  Synthetically generated peptide
CCEYCCCPACTGCY

SEQ ID NO: 1700 - protein, 14 aa, Artificial Sequence
  Synthetically generated peptide
CCEYCCQPACTGCY

SEQ ID NO: 1701 - protein, 14 aa, Artificial Sequence
  Synthetically generated peptide
CCEYCCYPACTGCY

SEQ ID NO: 1702 - protein, 14 aa, Artificial Sequence
  Synthetically generated peptide
CCEYCCDPACTGCY

SEQ ID NO: 1703 - protein, 14 aa, Artificial Sequence
  Synthetically generated peptide
CCEYCCEPACTGCY

SEQ ID NO: 1704 - protein, 14 aa, Artificial Sequence
  Synthetically generated peptide
CCEYCCKPACTGCY

SEQ ID NO: 1705 - protein, 14 aa, Artificial Sequence
  Synthetically generated peptide
CCEYCCRPACTGCY

SEQ ID NO: 1706 - protein, 14 aa, Artificial Sequence
  Synthetically generated peptide
CCEYCCHPACTGCY

SEQ ID NO: 1707 - protein, 13 aa, Artificial Sequence
  Synthetically generated peptide
CCELCCAPACTGC

SEQ ID NO: 1708 - protein, 13 aa, Artificial Sequence
  Synthetically generated peptide
CCELCCVPACTGC

SEQ ID NO: 1709 - protein, 13 aa, Artificial Sequence
  Synthetically generated peptide
CCELCCLPACTGC

SEQ ID NO: 1710 - protein, 13 aa, Artificial Sequence
  Synthetically generated peptide
CCELCCIPACTGC

SEQ ID NO: 1711 - protein, 13 aa, Artificial Sequence
  Synthetically generated peptide
CCELCCPPACTGC

SEQ ID NO: 1712 - protein, 13 aa, Artificial Sequence
  Synthetically generated peptide
CCELCCMPACTGC

SEQ ID NO: 1713 - protein, 13 aa, Artificial Sequence
  Synthetically generated peptide
CCELCCFPACTGC

SEQ ID NO: 1714 - protein, 13 aa, Artificial Sequence
  Synthetically generated peptide
CCELCCWPACTGC

SEQ ID NO: 1715 - protein, 13 aa, Artificial Sequence
  Synthetically generated peptide
CCELCCGPACTGC

SEQ ID NO: 1716 - protein, 13 aa, Artificial Sequence
  Synthetically generated peptide
CCELCCSPACTGC

SEQ ID NO: 1717 - protein, 13 aa, Artificial Sequence
  Synthetically generated peptide
CCELCCTPACTGC

SEQ ID NO: 1718 - protein, 13 aa, Artificial Sequence
  Synthetically generated peptide
CCELCCCPACTGC

SEQ ID NO: 1719 - protein, 13 aa, Artificial Sequence
  Synthetically generated peptide
CCELCCQPACTGC

SEQ ID NO: 1720 - protein, 13 aa, Artificial Sequence
  Synthetically generated peptide
CCELCCYPACTGC

SEQ ID NO: 1721 - protein, 13 aa, Artificial Sequence
  Synthetically generated peptide
CCELCCDPACTGC

SEQ ID NO: 1722 - protein, 13 aa, Artificial Sequence
  Synthetically generated peptide
CCELCCEPACTGC

SEQ ID NO: 1723 - protein, 13 aa, Artificial Sequence
  Synthetically generated peptide
CCELCCKPACTGC

SEQ ID NO: 1724 - protein, 13 aa, Artificial Sequence
  Synthetically generated peptide
CCELCCRPACTGC

SEQ ID NO: 1725 - protein, 13 aa, Artificial Sequence
  Synthetically generated peptide
CCELCCHPACTGC

SEQ ID NO: 1726 - protein, 13 aa, Artificial Sequence
  Synthetically generated peptide
CCEYCCAPACTGC

SEQ ID NO: 1727 - protein, 13 aa, Artificial Sequence
  Synthetically generated peptide
CCEYCCVPACTGC

SEQ ID NO: 1728 - protein, 13 aa, Artificial Sequence
  Synthetically generated peptide
CCEYCCLPACTGC

SEQ ID NO: 1729 - protein, 13 aa, Artificial Sequence
  Synthetically generated peptide
CCEYCCIPACTGC

SEQ ID NO: 1730 - protein, 13 aa, Artificial Sequence
  Synthetically generated peptide
CCEYCCPPACTGC

SEQ ID NO: 1731 - protein, 13 aa, Artificial Sequence
  Synthetically generated peptide
CCEYCCMPACTGC

SEQ ID NO: 1732 - protein, 13 aa, Artificial Sequence
  Synthetically generated peptide
CCEYCCFPACTGC

SEQ ID NO: 1733 - protein, 13 aa, Artificial Sequence
  Synthetically generated peptide
CCEYCCWPACTGC

SEQ ID NO: 1734 - protein, 13 aa, Artificial Sequence
  Synthetically generated peptide
CCEYCCGPACTGC

SEQ ID NO: 1735 - protein, 13 aa, Artificial Sequence
  Synthetically generated peptide
CCEYCCSPACTGC

SEQ ID NO: 1736 - protein, 13 aa, Artificial Sequence
  Synthetically generated peptide
CCEYCCTPACTGC

SEQ ID NO: 1737 - protein, 13 aa, Artificial Sequence
  Synthetically generated peptide
CCEYCCCPACTGC

SEQ ID NO: 1738 - protein, 13 aa, Artificial Sequence
  Synthetically generated peptide
CCEYCCQPACTGC

SEQ ID NO: 1739 - protein, 13 aa, Artificial Sequence
  Synthetically generated peptide
CCEYCCYPACTGC

SEQ ID NO: 1740 - protein, 13 aa, Artificial Sequence
  Synthetically generated peptide
CCEYCCDPACTGC

SEQ ID NO: 1741 - protein, 13 aa, Artificial Sequence
  Synthetically generated peptide
CCEYCCEPACTGC

SEQ ID NO: 1742 - protein, 13 aa, Artificial Sequence
  Synthetically generated peptide
CCEYCCKPACTGC

SEQ ID NO: 1743 - protein, 13 aa, Artificial Sequence
  Synthetically generated peptide
CCEYCCRPACTGC

SEQ ID NO: 1744 - protein, 13 aa, Artificial Sequence
  Synthetically generated peptide
CCEYCCHPACTGC

SEQ ID NO: 1745 - protein, 14 aa, Artificial Sequence
  Synthetically generated peptide
CCELCCNPTCTGCY

SEQ ID NO: 1746 - protein, 14 aa, Artificial Sequence
  Synthetically generated peptide
CCEYCCNPTCTGCY

SEQ ID NO: 1747 - protein, 13 aa, Artificial Sequence
  Synthetically generated peptide
CCELCCNPTCTGC

SEQ ID NO: 1748 - protein, 13 aa, Artificial Sequence
  Synthetically generated peptide
CCEYCCNPTCTGC

SEQ ID NO: 1749 - protein, 14 aa, Artificial Sequence
  Synthetically generated peptide
CCEFCCNPTCTGCY

SEQ ID NO: 1750 - protein, 13 aa, Artificial Sequence
  Synthetically generated peptide
CCEFCCNPTCTGC

SEQ ID NO: 1751 - protein, 14 aa, Artificial Sequence
  Synthetically generated peptide
CCEWCCNPTCTGCY

SEQ ID NO: 1752 - protein, 13 aa, Artificial Sequence
  Synthetically generated peptide
CCEWCCNPTCTGC

SEQ ID NO: 1753 - protein, 14 aa, Artificial Sequence
  Synthetically generated peptide
CCELCCNGACTGCY

SEQ ID NO: 1754 - protein, 14 aa, Artificial Sequence
  Synthetically generated peptide
CCEYCCNGACTGCY

SEQ ID NO: 1755 - protein, 13 aa, Artificial Sequence
  Synthetically generated peptide
CCELCCNGACTGC

SEQ ID NO: 1756 - protein, 13 aa, Artificial Sequence
  Synthetically generated peptide
CCEYCCNGACTGC

SEQ ID NO: 1757 - protein, 14 aa, Artificial Sequence
  Synthetically generated peptide
CCEFCCNGACTGCY

SEQ ID NO: 1758 - protein, 13 aa, Artificial Sequence
  Synthetically generated peptide
CCEFCCNGACTGC

SEQ ID NO: 1759 - protein, 14 aa, Artificial Sequence
  Synthetically generated peptide
CCEWCCNGACTGCY

SEQ ID NO: 1760 - protein, 13 aa, Artificial Sequence
  Synthetically generated peptide
CCEWCCNGACTGC

SEQ ID NO: 1761 - protein, 14 aa, Artificial Sequence
  Synthetically generated peptide
CCELCCNPACVGCY

SEQ ID NO: 1762 - protein, 14 aa, Artificial Sequence
  Synthetically generated peptide
CCEYCCNPACVGCY

SEQ ID NO: 1763 - protein, 13 aa, Artificial Sequence
  Synthetically generated peptide
CCELCCNPACVGC

SEQ ID NO: 1764 - protein, 13 aa, Artificial Sequence
  Synthetically generated peptide
CCEYCCNPACVGC

SEQ ID NO: 1765 - protein, 14 aa, Artificial Sequence
  Synthetically generated peptide
CCEFCCNPACVGCY

SEQ ID NO: 1766 - protein, 13 aa, Artificial Sequence
  Synthetically generated peptide
CCEFCCNPACVGC

SEQ ID NO: 1767 - protein, 14 aa, Artificial Sequence
  Synthetically generated peptide
CCEWCCNPACVGCY

SEQ ID NO: 1768 - protein, 13 aa, Artificial Sequence
  Synthetically generated peptide
CCEWCCNPACVGC

SEQ ID NO: 1769 - protein, 14 aa, Artificial Sequence
  Synthetically generated peptide
CCELCCNPACGGCY

SEQ ID NO: 1770 - protein, 14 aa, Artificial Sequence
  Synthetically generated peptide
CCEYCCNPACGGCY

SEQ ID NO: 1771 - protein, 13 aa, Artificial Sequence
  Synthetically generated peptide
CCELCCNPACGGC

SEQ ID NO: 1772 - protein, 13 aa, Artificial Sequence
  Synthetically generated peptide
CCEYCCNPACGGC

SEQ ID NO: 1773 - protein, 14 aa, Artificial Sequence
  Synthetically generated peptide
CCEFCCNPACGGCY

SEQ ID NO: 1774 - protein, 13 aa, Artificial Sequence
  Synthetically generated peptide
CCEFCCNPACGGC

SEQ ID NO: 1775 - protein, 14 aa, Artificial Sequence
  Synthetically generated peptide
CCEWCCNPACGGCY

SEQ ID NO: 1776 - protein, 13 aa, Artificial Sequence
  Synthetically generated peptide
CCEWCCNPACGGC

SEQ ID NO: 1777 - protein, 14 aa, Artificial Sequence
  Synthetically generated peptide
CCELCCNPACTACY

SEQ ID NO: 1778 - protein, 14 aa, Artificial Sequence
  Synthetically generated peptide
CCEYCCNPACTACY

SEQ ID NO: 1779 - protein, 13 aa, Artificial Sequence
  Synthetically generated peptide
CCELCCNPACTAC

SEQ ID NO: 1780 - protein, 13 aa, Artificial Sequence
  Synthetically generated peptide
CCEYCCNPACTAC

SEQ ID NO: 1781 - protein, 14 aa, Artificial Sequence
  Synthetically generated peptide
CCEWCCNPACTACY

SEQ ID NO: 1782 - protein, 13 aa, Artificial Sequence
  Synthetically generated peptide
CCEWCCNPACTAC

SEQ ID NO: 1783 - protein, 14 aa, Artificial Sequence
  Synthetically generated peptide
CCEFCCNPACTACY

SEQ ID NO: 1784 - protein, 13 aa, Artificial Sequence
  Synthetically generated peptide
CCEFCCNPACTAC

SEQ ID NO: 1785 - protein, 14 aa, Artificial Sequence
  Synthetically generated peptide
CCELCCNPACTGCA

SEQ ID NO: 1786 - protein, 14 aa, Artificial Sequence
  Synthetically generated peptide
CCELCCNPACTGCV

SEQ ID NO: 1787 - protein, 14 aa, Artificial Sequence
  Synthetically generated peptide
CCELCCNPACTGCL

SEQ ID NO: 1788 - protein, 14 aa, Artificial Sequence
  Synthetically generated peptide
CCELCCNPACTGCI

SEQ ID NO: 1789 - protein, 14 aa, Artificial Sequence
  Synthetically generated peptide
CCELCCNPACTGCP

SEQ ID NO: 1790 - protein, 14 aa, Artificial Sequence
  Synthetically generated peptide
CCELCCNPACTGCM

SEQ ID NO: 1791 - protein, 14 aa, Artificial Sequence
  Synthetically generated peptide
CCELCCNPACTGCF

SEQ ID NO: 1792 - protein, 14 aa, Artificial Sequence
  Synthetically generated peptide
CCELCCNPACTGCW

SEQ ID NO: 1793 - protein, 14 aa, Artificial Sequence
  Synthetically generated peptide
CCELCCNPACTGCG

SEQ ID NO: 1794 - protein, 14 aa, Artificial Sequence
  Synthetically generated peptide
CCELCCNPACTGCS

SEQ ID NO: 1795 - protein, 14 aa, Artificial Sequence
  Synthetically generated peptide
CCELCCNPACTGCT

SEQ ID NO: 1796 - protein, 14 aa, Artificial Sequence
  Synthetically generated peptide
CCELCCNPACTGCC

SEQ ID NO: 1797 - protein, 14 aa, Artificial Sequence
  Synthetically generated peptide
CCELCCNPACTGCN

SEQ ID NO: 1798 - protein, 14 aa, Artificial Sequence
  Synthetically generated peptide
CCELCCNPACTGCQ

SEQ ID NO: 1799 - protein, 14 aa, Artificial Sequence
  Synthetically generated peptide
CCELCCNPACTGCD

SEQ ID NO: 1800 - protein, 14 aa, Artificial Sequence
  Synthetically generated peptide
CCELCCNPACTGCE

SEQ ID NO: 1801 - protein, 14 aa, Artificial Sequence
  Synthetically generated peptide
CCELCCNPACTGCK

SEQ ID NO: 1802 - protein, 14 aa, Artificial Sequence
  Synthetically generated peptide
CCELCCNPACTGCR

SEQ ID NO: 1803 - protein, 14 aa, Artificial Sequence
  Synthetically generated peptide
CCELCCNPACTGCH

SEQ ID NO: 1804 - protein, 14 aa, Artificial Sequence
  Synthetically generated peptide
CCEYCCNPACTGCA

SEQ ID NO: 1805 - protein, 14 aa, Artificial Sequence
  Synthetically generated peptide
CCEYCCNPACTGCV

SEQ ID NO: 1806 - protein, 14 aa, Artificial Sequence
  Synthetically generated peptide
CCEYCCNPACTGCL

SEQ ID NO: 1807 - protein, 14 aa, Artificial Sequence
  Synthetically generated peptide
CCEYCCNPACTGCI

SEQ ID NO: 1808 - protein, 14 aa, Artificial Sequence
  Synthetically generated peptide
CCEYCCNPACTGCP

SEQ ID NO: 1809 - protein, 14 aa, Artificial Sequence
  Synthetically generated peptide
CCEYCCNPACTGCM

SEQ ID NO: 1810 - protein, 14 aa, Artificial Sequence
  Synthetically generated peptide
CCEYCCNPACTGCF

SEQ ID NO: 1811 - protein, 14 aa, Artificial Sequence
  Synthetically generated peptide
CCEYCCNPACTGCW

SEQ ID NO: 1812 - protein, 14 aa, Artificial Sequence
  Synthetically generated peptide
CCEYCCNPACTGCG

SEQ ID NO: 1813 - protein, 14 aa, Artificial Sequence
  Synthetically generated peptide
CCEYCCNPACTGCS

SEQ ID NO: 1814 - protein, 14 aa, Artificial Sequence
  Synthetically generated peptide
CCEYCCNPACTGCT

SEQ ID NO: 1815 - protein, 14 aa, Artificial Sequence
  Synthetically generated peptide
CCEYCCNPACTGCC

SEQ ID NO: 1816 - protein, 14 aa, Artificial Sequence
  Synthetically generated peptide
CCEYCCNPACTGCN

SEQ ID NO: 1817 - protein, 14 aa, Artificial Sequence
  Synthetically generated peptide
CCEYCCNPACTGCQ

SEQ ID NO: 1818 - protein, 14 aa, Artificial Sequence
  Synthetically generated peptide
CCEYCCNPACTGCD

SEQ ID NO: 1819 - protein, 14 aa, Artificial Sequence
  Synthetically generated peptide
CCEYCCNPACTGCE

SEQ ID NO: 1820 - protein, 14 aa, Artificial Sequence
  Synthetically generated peptide
CCEYCCNPACTGCK

SEQ ID NO: 1821 - protein, 14 aa, Artificial Sequence
  Synthetically generated peptide
CCEYCCNPACTGCR

SEQ ID NO: 1822 - protein, 14 aa, Artificial Sequence
  Synthetically generated peptide
CCEYCCNPACTGCH

SEQ ID NO: 1823 - protein, 14 aa, Artificial Sequence
  Synthetically generated peptide
CCALCCNPACTGCY

SEQ ID NO: 1824 - protein, 14 aa, Artificial Sequence
  Synthetically generated peptide
CCVLCCNPACTGCY

SEQ ID NO: 1825 - protein, 14 aa, Artificial Sequence
  Synthetically generated peptide
CCLLCCNPACTGCY

SEQ ID NO: 1826 - protein, 14 aa, Artificial Sequence
  Synthetically generated peptide
CCILCCNPACTGCY

SEQ ID NO: 1827 - protein, 14 aa, Artificial Sequence
  Synthetically generated peptide
CCMLCCNPACTGCY

SEQ ID NO: 1828 - protein, 14 aa, Artificial Sequence
  Synthetically generated peptide
CCFLCCNPACTGCY

SEQ ID NO: 1829 - protein, 14 aa, Artificial Sequence
  Synthetically generated peptide
CCWLCCNPACTGCY

SEQ ID NO: 1830 - protein, 14 aa, Artificial Sequence
  Synthetically generated peptide
CCGLCCNPACTGCY

SEQ ID NO: 1831 - protein, 14 aa, Artificial Sequence
  Synthetically generated peptide
CCSLCCNPACTGCY

SEQ ID NO: 1832 - protein, 14 aa, Artificial Sequence
  Synthetically generated peptide
CCTLCCNPACTGCY

SEQ ID NO: 1833 - protein, 14 aa, Artificial Sequence
  Synthetically generated peptide
CCCLCCNPACTGCY

SEQ ID NO: 1834 - protein, 14 aa, Artificial Sequence
  Synthetically generated peptide
CCNLCCNPACTGCY

SEQ ID NO: 1835 - protein, 14 aa, Artificial Sequence
  Synthetically generated peptide
CCQLCCNPACTGCY

SEQ ID NO: 1836 - protein, 14 aa, Artificial Sequence
  Synthetically generated peptide
CCYLCCNPACTGCY

SEQ ID NO: 1837 - protein, 14 aa, Artificial Sequence
  Synthetically generated peptide
CCDLCCNPACTGCY

SEQ ID NO: 1838 - protein, 14 aa, Artificial Sequence
  Synthetically generated peptide
CCKLCCNPACTGCY

SEQ ID NO: 1839 - protein, 14 aa, Artificial Sequence
  Synthetically generated peptide
CCRLCCNPACTGCY

SEQ ID NO: 1840 - protein, 14 aa, Artificial Sequence
  Synthetically generated peptide
CCHLCCNPACTGCY

SEQ ID NO: 1841 - protein, 13 aa, Artificial Sequence
  Synthetically generated peptide
CCALCCNPACTGC

SEQ ID NO: 1842 - protein, 13 aa, Artificial Sequence
  Synthetically generated peptide
CCVLCCNPACTGC

SEQ ID NO: 1843 - protein, 13 aa, Artificial Sequence
  Synthetically generated peptide
CCLLCCNPACTGC

SEQ ID NO: 1844 - protein, 13 aa, Artificial Sequence
  Synthetically generated peptide
CCILCCNPACTGC

SEQ ID NO: 1845 - protein, 13 aa, Artificial Sequence
  Synthetically generated peptide
CCMLCCNPACTGC

SEQ ID NO: 1846 - protein, 13 aa, Artificial Sequence
  Synthetically generated peptide
CCFLCCNPACTGC

SEQ ID NO: 1847 - protein, 13 aa, Artificial Sequence
  Synthetically generated peptide
CCWLCCNPACTGC

SEQ ID NO: 1848 - protein, 13 aa, Artificial Sequence
  Synthetically generated peptide
CCGLCCNPACTGC

SEQ ID NO: 1849 - protein, 13 aa, Artificial Sequence
  Synthetically generated peptide
CCSLCCNPACTGC

SEQ ID NO: 1850 - protein, 13 aa, Artificial Sequence
  Synthetically generated peptide
CCTLCCNPACTGC

SEQ ID NO: 1851 - protein, 13 aa, Artificial Sequence
  Synthetically generated peptide
CCCLCCNPACTGC

SEQ ID NO: 1852 - protein, 13 aa, Artificial Sequence
  Synthetically generated peptide
CCNLCCNPACTGC

SEQ ID NO: 1853 - protein, 13 aa, Artificial Sequence
  Synthetically generated peptide
CCQLCCNPACTGC

SEQ ID NO: 1854 - protein, 13 aa, Artificial Sequence
  Synthetically generated peptide
CCYLCCNPACTGC

SEQ ID NO: 1855 - protein, 13 aa, Artificial Sequence
  Synthetically generated peptide
CCDLCCNPACTGC

SEQ ID NO: 1856 - protein, 13 aa, Artificial Sequence
  Synthetically generated peptide
CCKLCCNPACTGC

SEQ ID NO: 1857 - protein, 13 aa, Artificial Sequence
  Synthetically generated peptide
CCRLCCNPACTGC

SEQ ID NO: 1858 - protein, 13 aa, Artificial Sequence
  Synthetically generated peptide
CCHLCCNPACTGC

SEQ ID NO: 1859 - protein, 14 aa, Artificial Sequence
  Synthetically generated peptide
CCAYCCNPACTGCY

SEQ ID NO: 1860 - protein, 14 aa, Artificial Sequence
  Synthetically generated peptide
CCVYCCNPACTGCY

SEQ ID NO: 1861 - protein, 14 aa, Artificial Sequence
  Synthetically generated peptide
CCLYCCNPACTGCY

SEQ ID NO: 1862 - protein, 14 aa, Artificial Sequence
  Synthetically generated peptide
CCIYCCNPACTGCY

SEQ ID NO: 1863 - protein, 14 aa, Artificial Sequence
  Synthetically generated peptide
CCMYCCNPACTGCY

SEQ ID NO: 1864 - protein, 14 aa, Artificial Sequence
  Synthetically generated peptide
CCFYCCNPACTGCY

SEQ ID NO: 1865 - protein, 14 aa, Artificial Sequence
  Synthetically generated peptide
CCWYCCNPACTGCY

SEQ ID NO: 1866 - protein, 14 aa, Artificial Sequence
  Synthetically generated peptide
CCGYCCNPACTGCY

SEQ ID NO: 1867 - protein, 14 aa, Artificial Sequence
  Synthetically generated peptide
CCSYCCNPACTGCY

SEQ ID NO: 1868 - protein, 14 aa, Artificial Sequence
  Synthetically generated peptide
CCTYCCNPACTGCY

SEQ ID NO: 1869 - protein, 14 aa, Artificial Sequence
  Synthetically generated peptide
CCCYCCNPACTGCY

SEQ ID NO: 1870 - protein, 14 aa, Artificial Sequence
  Synthetically generated peptide
CCNYCCNPACTGCY

SEQ ID NO: 1871 - protein, 14 aa, Artificial Sequence
  Synthetically generated peptide
CCQYCCNPACTGCY

SEQ ID NO: 1872 - protein, 14 aa, Artificial Sequence
  Synthetically generated peptide
CCYYCCNPACTGCY

SEQ ID NO: 1873 - protein, 14 aa, Artificial Sequence
  Synthetically generated peptide
CCDYCCNPACTGCY

SEQ ID NO: 1874 - protein, 14 aa, Artificial Sequence
  Synthetically generated peptide
CCKYCCNPACTGCY

SEQ ID NO: 1875 - protein, 14 aa, Artificial Sequence
  Synthetically generated peptide
CCRYCCNPACTGCY

SEQ ID NO: 1876 - protein, 14 aa, Artificial Sequence
  Synthetically generated peptide
CCHYCCNPACTGCY

SEQ ID NO: 1877 - protein, 13 aa, Artificial Sequence
  Synthetically generated peptide
CCAYCCNPACTGC

SEQ ID NO: 1878 - protein, 13 aa, Artificial Sequence
  Synthetically generated peptide
CCVYCCNPACTGC

SEQ ID NO: 1879 - protein, 13 aa, Artificial Sequence
  Synthetically generated peptide
CCLYCCNPACTGC

SEQ ID NO: 1880 - protein, 13 aa, Artificial Sequence
  Synthetically generated peptide
CCIYCCNPACTGC

SEQ ID NO: 1881 - protein, 13 aa, Artificial Sequence
  Synthetically generated peptide
CCMYCCNPACTGC

SEQ ID NO: 1882 - protein, 13 aa, Artificial Sequence
  Synthetically generated peptide
CCFYCCNPACTGC

SEQ ID NO: 1883 - protein, 13 aa, Artificial Sequence
  Synthetically generated peptide
CCWYCCNPACTGC

SEQ ID NO: 1884 - protein, 13 aa, Artificial Sequence
  Synthetically generated peptide
CCGYCCNPACTGC

SEQ ID NO: 1885 - protein, 13 aa, Artificial Sequence
  Synthetically generated peptide
CCSYCCNPACTGC

SEQ ID NO: 1886 - protein, 13 aa, Artificial Sequence
  Synthetically generated peptide
CCTYCCNPACTGC

SEQ ID NO: 1887 - protein, 13 aa, Artificial Sequence
  Synthetically generated peptide
CCCYCCNPACTGC

SEQ ID NO: 1888 - protein, 13 aa, Artificial Sequence
  Synthetically generated peptide
CCNYCCNPACTGC

SEQ ID NO: 1889 - protein, 13 aa, Artificial Sequence
  Synthetically generated peptide
CCQYCCNPACTGC

SEQ ID NO: 1890 - protein, 13 aa, Artificial Sequence
  Synthetically generated peptide
CCYYCCNPACTGC

SEQ ID NO: 1891 - protein, 13 aa, Artificial Sequence
  Synthetically generated peptide
CCDYCCNPACTGC

SEQ ID NO: 1892 - protein, 13 aa, Artificial Sequence
  Synthetically generated peptide
CCKYCCNPACTGC

SEQ ID NO: 1893 - protein, 13 aa, Artificial Sequence
  Synthetically generated peptide
CCRYCCNPACTGC

SEQ ID NO: 1894 - protein, 13 aa, Artificial Sequence
  Synthetically generated peptide
CCHYCCNPACTGC

SEQ ID NO: 1895 - protein, 14 aa, Artificial Sequence
  Synthetically generated peptide
CCEFCCAPACTGCY

SEQ ID NO: 1896 - protein, 14 aa, Artificial Sequence
  Synthetically generated peptide
CCEFCCVPACTGCY

SEQ ID NO: 1897 - protein, 14 aa, Artificial Sequence
  Synthetically generated peptide
CCEFCCLPACTGCY

SEQ ID NO: 1898 - protein, 14 aa, Artificial Sequence
  Synthetically generated peptide
CCEFCCIPACTGCY

SEQ ID NO: 1899 - protein, 14 aa, Artificial Sequence
  Synthetically generated peptide
CCEFCCPPACTGCY

SEQ ID NO: 1900 - protein, 14 aa, Artificial Sequence
  Synthetically generated peptide
CCEFCCMPACTGCY

SEQ ID NO: 1901 - protein, 14 aa, Artificial Sequence
  Synthetically generated peptide
CCEFCCFPACTGCY

SEQ ID NO: 1902 - protein, 14 aa, Artificial Sequence
  Synthetically generated peptide
CCEFCCWPACTGCY

SEQ ID NO: 1903 - protein, 14 aa, Artificial Sequence
  Synthetically generated peptide
CCEFCCGPACTGCY

SEQ ID NO: 1904 - protein, 14 aa, Artificial Sequence
  Synthetically generated peptide
CCEFCCSPACTGCY

SEQ ID NO: 1905 - protein, 14 aa, Artificial Sequence
  Synthetically generated peptide
CCEFCCTPACTGCY

SEQ ID NO: 1906 - protein, 14 aa, Artificial Sequence
  Synthetically generated peptide
CCEFCCCPACTGCY

SEQ ID NO: 1907 - protein, 14 aa, Artificial Sequence
  Synthetically generated peptide
CCEFCCQPACTGCY

SEQ ID NO: 1908 - protein, 14 aa, Artificial Sequence
  Synthetically generated peptide
CCEFCCYPACTGCY

SEQ ID NO: 1909 - protein, 14 aa, Artificial Sequence
  Synthetically generated peptide
CCEFCCDPACTGCY

SEQ ID NO: 1910 - protein, 14 aa, Artificial Sequence
  Synthetically generated peptide
CCEFCCEPACTGCY

SEQ ID NO: 1911 - protein, 14 aa, Artificial Sequence
  Synthetically generated peptide
CCEFCCKPACTGCY

SEQ ID NO: 1912 - protein, 14 aa, Artificial Sequence
  Synthetically generated peptide
CCEFCCRPACTGCY

SEQ ID NO: 1913 - protein, 14 aa, Artificial Sequence
  Synthetically generated peptide
CCEFCCHPACTGCY

SEQ ID NO: 1914 - protein, 13 aa, Artificial Sequence
  Synthetically generated peptide
CCEFCCAPACTGC

SEQ ID NO: 1915 - protein, 13 aa, Artificial Sequence
  Synthetically generated peptide
CCEFCCVPACTGC

SEQ ID NO: 1916 - protein, 13 aa, Artificial Sequence
  Synthetically generated peptide
CCEFCCLPACTGC

SEQ ID NO: 1917 - protein, 13 aa, Artificial Sequence
  Synthetically generated peptide
CCEFCCIPACTGC

SEQ ID NO: 1918 - protein, 13 aa, Artificial Sequence
  Synthetically generated peptide
CCEFCCPPACTGC

SEQ ID NO: 1919 - protein, 13 aa, Artificial Sequence
  Synthetically generated peptide
CCEFCCMPACTGC

SEQ ID NO: 1920 - protein, 13 aa, Artificial Sequence
  Synthetically generated peptide
CCEFCCFPACTGC

SEQ ID NO: 1921 - protein, 13 aa, Artificial Sequence
  Synthetically generated peptide
CCEFCCWPACTGC

SEQ ID NO: 1922 - protein, 13 aa, Artificial Sequence
  Synthetically generated peptide
CCEFCCGPACTGC

SEQ ID NO: 1923 - protein, 13 aa, Artificial Sequence
  Synthetically generated peptide
CCEFCCSPACTGC

SEQ ID NO: 1924 - protein, 13 aa, Artificial Sequence
  Synthetically generated peptide
CCEFCCTPACTGC

SEQ ID NO: 1925 - protein, 13 aa, Artificial Sequence
  Synthetically generated peptide
CCEFCCCPACTGC

SEQ ID NO: 1926 - protein, 13 aa, Artificial Sequence
  Synthetically generated peptide
CCEFCCQPACTGC

SEQ ID NO: 1927 - protein, 13 aa, Artificial Sequence
  Synthetically generated peptide
CCEFCCYPACTGC

SEQ ID NO: 1928 - protein, 13 aa, Artificial Sequence
  Synthetically generated peptide
CCEFCCDPACTGC

SEQ ID NO: 1929 - protein, 13 aa, Artificial Sequence
  Synthetically generated peptide
CCEFCCEPACTGC

SEQ ID NO: 1930 - protein, 13 aa, Artificial Sequence
  Synthetically generated peptide
CCEFCCKPACTGC

SEQ ID NO: 1931 - protein, 13 aa, Artificial Sequence
  Synthetically generated peptide
CCEFCCRPACTGC

SEQ ID NO: 1932 - protein, 13 aa, Artificial Sequence
  Synthetically generated peptide
CCEFCCHPACTGC

SEQ ID NO: 1933 - protein, 14 aa, Artificial Sequence
  Synthetically generated peptide
CCEWCCAPACTGCY

SEQ ID NO: 1934 - protein, 14 aa, Artificial Sequence
  Synthetically generated peptide
CCEWCCVPACTGCY

SEQ ID NO: 1935 - protein, 14 aa, Artificial Sequence
  Synthetically generated peptide
CCEWCCLPACTGCY

SEQ ID NO: 1936 - protein, 14 aa, Artificial Sequence
  Synthetically generated peptide
CCEWCCIPACTGCY

SEQ ID NO: 1937 - protein, 14 aa, Artificial Sequence
  Synthetically generated peptide
CCEWCCPPACTGCY

SEQ ID NO: 1938 - protein, 14 aa, Artificial Sequence
  Synthetically generated peptide
CCEWCCMPACTGCY

SEQ ID NO: 1939 - protein, 14 aa, Artificial Sequence
  Synthetically generated peptide
CCEWCCFPACTGCY

SEQ ID NO: 1940 - protein, 14 aa, Artificial Sequence
  Synthetically generated peptide
CCEWCCWPACTGCY

SEQ ID NO: 1941 - protein, 14 aa, Artificial Sequence
  Synthetically generated peptide
CCEWCCGPACTGCY

SEQ ID NO: 1942 - protein, 14 aa, Artificial Sequence
  Synthetically generated peptide
CCEWCCSPACTGCY

SEQ ID NO: 1943 - protein, 14 aa, Artificial Sequence
  Synthetically generated peptide
CCEWCCTPACTGCY

SEQ ID NO: 1944 - protein, 14 aa, Artificial Sequence
  Synthetically generated peptide
CCEWCCCPACTGCY

SEQ ID NO: 1945 - protein, 14 aa, Artificial Sequence
  Synthetically generated peptide
CCEWCCQPACTGCY

SEQ ID NO: 1946 - protein, 14 aa, Artificial Sequence
  Synthetically generated peptide
CCEWCCYPACTGCY

SEQ ID NO: 1947 - protein, 14 aa, Artificial Sequence
  Synthetically generated peptide
CCEWCCDPACTGCY

SEQ ID NO: 1948 - protein, 14 aa, Artificial Sequence
  Synthetically generated peptide
CCEWCCEPACTGCY

SEQ ID NO: 1949 - protein, 14 aa, Artificial Sequence
  Synthetically generated peptide
CCEWCCKPACTGCY

SEQ ID NO: 1950 - protein, 14 aa, Artificial Sequence
  Synthetically generated peptide
CCEWCCRPACTGCY

SEQ ID NO: 1951 - protein, 14 aa, Artificial Sequence
  Synthetically generated peptide
CCEWCCHPACTGCY

SEQ ID NO: 1952 - protein, 13 aa, Artificial Sequence
  Synthetically generated peptide
CCEWCCAPACTGC

SEQ ID NO: 1953 - protein, 13 aa, Artificial Sequence
  Synthetically generated peptide
CCEWCCVPACTGC

SEQ ID NO: 1954 - protein, 13 aa, Artificial Sequence
  Synthetically generated peptide
CCEWCCLPACTGC

SEQ ID NO: 1955 - protein, 13 aa, Artificial Sequence
  Synthetically generated peptide
CCEWCCIPACTGC

SEQ ID NO: 1956 - protein, 13 aa, Artificial Sequence
  Synthetically generated peptide
CCEWCCPPACTGC

SEQ ID NO: 1957 - protein, 13 aa, Artificial Sequence
  Synthetically generated peptide
CCEWCCMPACTGC

SEQ ID NO: 1958 - protein, 13 aa, Artificial Sequence
  Synthetically generated peptide
CCEWCCFPACTGC

SEQ ID NO: 1959 - protein, 13 aa, Artificial Sequence
  Synthetically generated peptide
CCEWCCWPACTGC

SEQ ID NO: 1960 - protein, 13 aa, Artificial Sequence
  Synthetically generated peptide
CCEWCCGPACTGC

SEQ ID NO: 1961 - protein, 13 aa, Artificial Sequence
  Synthetically generated peptide
CCEWCCSPACTGC

SEQ ID NO: 1962 - protein, 13 aa, Artificial Sequence
  Synthetically generated peptide
CCEWCCTPACTGC

SEQ ID NO: 1963 - protein, 13 aa, Artificial Sequence
  Synthetically generated peptide
CCEWCCCPACTGC

SEQ ID NO: 1964 - protein, 13 aa, Artificial Sequence
  Synthetically generated peptide
CCEWCCQPACTGC

SEQ ID NO: 1965 - protein, 13 aa, Artificial Sequence
  Synthetically generated peptide
CCEWCCYPACTGC

SEQ ID NO: 1966 - protein, 13 aa, Artificial Sequence
  Synthetically generated peptide
CCEWCCDPACTGC

SEQ ID NO: 1967 - protein, 13 aa, Artificial Sequence
  Synthetically generated peptide
CCEWCCEPACTGC

SEQ ID NO: 1968 - protein, 13 aa, Artificial Sequence
  Synthetically generated peptide
CCEWCCKPACTGC

SEQ ID NO: 1969 - protein, 13 aa, Artificial Sequence
  Synthetically generated peptide
CCEWCCRPACTGC

SEQ ID NO: 1970 - protein, 13 aa, Artificial Sequence
  Synthetically generated peptide
CCEWCCHPACTGC

SEQ ID NO: 1971 - protein, 14 aa, Artificial Sequence
  Synthetically generated peptide
CCEWCCNPACTGCA

SEQ ID NO: 1972 - protein, 14 aa, Artificial Sequence
  Synthetically generated peptide
CCEWCCNPACTGCV

SEQ ID NO: 1973 - protein, 14 aa, Artificial Sequence
  Synthetically generated peptide
CCEWCCNPACTGCL

SEQ ID NO: 1974 - protein, 14 aa, Artificial Sequence
  Synthetically generated peptide
CCEWCCNPACTGCI

SEQ ID NO: 1975 - protein, 14 aa, Artificial Sequence
  Synthetically generated peptide
CCEWCCNPACTGCP

SEQ ID NO: 1976 - protein, 14 aa, Artificial Sequence
  Synthetically generated peptide
CCEWCCNPACTGCM

SEQ ID NO: 1977 - protein, 14 aa, Artificial Sequence
  Synthetically generated peptide
CCEWCCNPACTGCF

SEQ ID NO: 1978 - protein, 14 aa, Artificial Sequence
  Synthetically generated peptide
CCEWCCNPACTGCW

SEQ ID NO: 1979 - protein, 14 aa, Artificial Sequence
  Synthetically generated peptide
CCEWCCNPACTGCG

SEQ ID NO: 1980 - protein, 14 aa, Artificial Sequence
  Synthetically generated peptide
CCEWCCNPACTGCS

SEQ ID NO: 1981 - protein, 14 aa, Artificial Sequence
  Synthetically generated peptide
CCEWCCNPACTGCT

SEQ ID NO: 1982 - protein, 14 aa, Artificial Sequence
  Synthetically generated peptide
CCEWCCNPACTGCC

SEQ ID NO: 1983 - protein, 14 aa, Artificial Sequence
  Synthetically generated peptide
CCEWCCNPACTGCN

SEQ ID NO: 1984 - protein, 14 aa, Artificial Sequence
  Synthetically generated peptide
CCEWCCNPACTGCQ

SEQ ID NO: 1985 - protein, 14 aa, Artificial Sequence
  Synthetically generated peptide
CCEWCCNPACTGCD

SEQ ID NO: 1986 - protein, 14 aa, Artificial Sequence
  Synthetically generated peptide
CCEWCCNPACTGCE

SEQ ID NO: 1987 - protein, 14 aa, Artificial Sequence
  Synthetically generated peptide
CCEWCCNPACTGCK

SEQ ID NO: 1988 - protein, 14 aa, Artificial Sequence
  Synthetically generated peptide
CCEWCCNPACTGCR

SEQ ID NO: 1989 - protein, 14 aa, Artificial Sequence
  Synthetically generated peptide
CCEWCCNPACTGCH

SEQ ID NO: 1990 - protein, 14 aa, Artificial Sequence
  Synthetically generated peptide
CCEFCCNPACTGCA

SEQ ID NO: 1991 - protein, 14 aa, Artificial Sequence
  Synthetically generated peptide
CCEFCCNPACTGCV

SEQ ID NO: 1992 - protein, 14 aa, Artificial Sequence
  Synthetically generated peptide
CCEFCCNPACTGCL

SEQ ID NO: 1993 - protein, 14 aa, Artificial Sequence
  Synthetically generated peptide
CCEFCCNPACTGCI

SEQ ID NO: 1994 - protein, 14 aa, Artificial Sequence
  Synthetically generated peptide
CCEFCCNPACTGCP

SEQ ID NO: 1995 - protein, 14 aa, Artificial Sequence
  Synthetically generated peptide
CCEFCCNPACTGCM

SEQ ID NO: 1996 - protein, 14 aa, Artificial Sequence
  Synthetically generated peptide
CCEFCCNPACTGCF

SEQ ID NO: 1997 - protein, 14 aa, Artificial Sequence
  Synthetically generated peptide
CCEFCCNPACTGCW

SEQ ID NO: 1998 - protein, 14 aa, Artificial Sequence
  Synthetically generated peptide
CCEFCCNPACTGCG

SEQ ID NO: 1999 - protein, 14 aa, Artificial Sequence
  Synthetically generated peptide
CCEFCCNPACTGCS

SEQ ID NO: 2000 - protein, 14 aa, Artificial Sequence
  Synthetically generated peptide
CCEFCCNPACTGCT

SEQ ID NO: 2001 - protein, 14 aa, Artificial Sequence
  Synthetically generated peptide
CCEFCCNPACTGCC

SEQ ID NO: 2002 - protein, 14 aa, Artificial Sequence
  Synthetically generated peptide
CCEFCCNPACTGCN

SEQ ID NO: 2003 - protein, 14 aa, Artificial Sequence
  Synthetically generated peptide
CCEFCCNPACTGCQ

SEQ ID NO: 2004 - protein, 14 aa, Artificial Sequence
  Synthetically generated peptide
CCEFCCNPACTGCD

SEQ ID NO: 2005 - protein, 14 aa, Artificial Sequence
  Synthetically generated peptide
CCEFCCNPACTGCE

SEQ ID NO: 2006 - protein, 14 aa, Artificial Sequence
  Synthetically generated peptide
CCEFCCNPACTGCK

SEQ ID NO: 2007 - protein, 14 aa, Artificial Sequence
  Synthetically generated peptide
CCEFCCNPACTGCR

SEQ ID NO: 2008 - protein, 14 aa, Artificial Sequence
  Synthetically generated peptide
CCEFCCNPACTGCH

SEQ ID NO: 2009 - protein, 14 aa, Artificial Sequence
  Synthetically generated peptide
CCAFCCNPACTGCY

SEQ ID NO: 2010 - protein, 14 aa, Artificial Sequence
  Synthetically generated peptide
CCVFCCNPACTGCY

SEQ ID NO: 2011 - protein, 14 aa, Artificial Sequence
  Synthetically generated peptide
CCLFCCNPACTGCY

SEQ ID NO: 2012 - protein, 14 aa, Artificial Sequence
  Synthetically generated peptide
CCIFCCNPACTGCY

SEQ ID NO: 2013 - protein, 14 aa, Artificial Sequence
  Synthetically generated peptide
CCMFCCNPACTGCY

SEQ ID NO: 2014 - protein, 14 aa, Artificial Sequence
  Synthetically generated peptide
CCFFCCNPACTGCY

SEQ ID NO: 2015 - protein, 14 aa, Artificial Sequence
  Synthetically generated peptide
CCWFCCNPACTGCY

SEQ ID NO: 2016 - protein, 14 aa, Artificial Sequence
  Synthetically generated peptide
CCGFCCNPACTGCY

SEQ ID NO: 2017 - protein, 14 aa, Artificial Sequence
  Synthetically generated peptide
CCSFCCNPACTGCY

SEQ ID NO: 2018 - protein, 14 aa, Artificial Sequence
  Synthetically generated peptide
CCTFCCNPACTGCY

SEQ ID NO: 2019 - protein, 14 aa, Artificial Sequence
  Synthetically generated peptide
CCCFCCNPACTGCY

SEQ ID NO: 2020 - protein, 14 aa, Artificial Sequence
  Synthetically generated peptide
CCNFCCNPACTGCY

SEQ ID NO: 2021 - protein, 14 aa, Artificial Sequence
  Synthetically generated peptide
CCQFCCNPACTGCY

SEQ ID NO: 2022 - protein, 14 aa, Artificial Sequence
  Synthetically generated peptide
CCYFCCNPACTGCY

SEQ ID NO: 2023 - protein, 14 aa, Artificial Sequence
  Synthetically generated peptide
CCDFCCNPACTGCY

SEQ ID NO: 2024 - protein, 14 aa, Artificial Sequence
  Synthetically generated peptide
CCKFCCNPACTGCY

SEQ ID NO: 2025 - protein, 14 aa, Artificial Sequence
  Synthetically generated peptide
CCRFCCNPACTGCY

SEQ ID NO: 2026 - protein, 14 aa, Artificial Sequence
  Synthetically generated peptide
CCHFCCNPACTGCY

SEQ ID NO: 2027 - protein, 13 aa, Artificial Sequence
  Synthetically generated peptide
CCAFCCNPACTGC

SEQ ID NO: 2028 - protein, 13 aa, Artificial Sequence
  Synthetically generated peptide
CCVFCCNPACTGC

SEQ ID NO: 2029 - protein, 13 aa, Artificial Sequence
  Synthetically generated peptide
CCLFCCNPACTGC

SEQ ID NO: 2030 - protein, 13 aa, Artificial Sequence
  Synthetically generated peptide
CCIFCCNPACTGC

SEQ ID NO: 2031 - protein, 13 aa, Artificial Sequence
  Synthetically generated peptide
CCMFCCNPACTGC

SEQ ID NO: 2032 - protein, 13 aa, Artificial Sequence
  Synthetically generated peptide
CCFFCCNPACTGC

SEQ ID NO: 2033 - protein, 13 aa, Artificial Sequence
  Synthetically generated peptide
CCWFCCNPACTGC

SEQ ID NO: 2034 - protein, 13 aa, Artificial Sequence
  Synthetically generated peptide
CCGFCCNPACTGC

SEQ ID NO: 2035 - protein, 13 aa, Artificial Sequence
  Synthetically generated peptide
CCSFCCNPACTGC

SEQ ID NO: 2036 - protein, 13 aa, Artificial Sequence
  Synthetically generated peptide
CCTFCCNPACTGC

SEQ ID NO: 2037 - protein, 13 aa, Artificial Sequence
  Synthetically generated peptide
CCCFCCNPACTGC

SEQ ID NO: 2038 - protein, 13 aa, Artificial Sequence
  Synthetically generated peptide
CCNFCCNPACTGC

SEQ ID NO: 2039 - protein, 13 aa, Artificial Sequence
  Synthetically generated peptide
CCQFCCNPACTGC

SEQ ID NO: 2040 - protein, 13 aa, Artificial Sequence
  Synthetically generated peptide
CCYFCCNPACTGC

SEQ ID NO: 2041 - protein, 13 aa, Artificial Sequence
  Synthetically generated peptide
CCDFCCNPACTGC

SEQ ID NO: 2042 - protein, 13 aa, Artificial Sequence
  Synthetically generated peptide
CCKFCCNPACTGC

SEQ ID NO: 2043 - protein, 13 aa, Artificial Sequence
  Synthetically generated peptide
CCRFCCNPACTGC

SEQ ID NO: 2044 - protein, 13 aa, Artificial Sequence
  Synthetically generated peptide
CCHFCCNPACTGC

SEQ ID NO: 2045 - protein, 14 aa, Artificial Sequence
  Synthetically generated peptide
CCAWCCNPACTGCY

SEQ ID NO: 2046 - protein, 14 aa, Artificial Sequence
  Synthetically generated peptide
CCVWCCNPACTGCY

SEQ ID NO: 2047 - protein, 14 aa, Artificial Sequence
  Synthetically generated peptide
CCLWCCNPACTGCY

SEQ ID NO: 2048 - protein, 14 aa, Artificial Sequence
  Synthetically generated peptide
CCIWCCNPACTGCY

SEQ ID NO: 2049 - protein, 14 aa, Artificial Sequence
  Synthetically generated peptide
CCMWCCNPACTGCY

SEQ ID NO: 2050 - protein, 14 aa, Artificial Sequence
  Synthetically generated peptide
CCFWCCNPACTGCY

SEQ ID NO: 2051 - protein, 14 aa, Artificial Sequence
  Synthetically generated peptide
CCWWCCNPACTGCY

SEQ ID NO: 2052 - protein, 14 aa, Artificial Sequence
  Synthetically generated peptide
CCGWCCNPACTGCY

SEQ ID NO: 2053 - protein, 14 aa, Artificial Sequence
  Synthetically generated peptide
CCSWCCNPACTGCY

SEQ ID NO: 2054 - protein, 14 aa, Artificial Sequence
  Synthetically generated peptide
CCTWCCNPACTGCY

SEQ ID NO: 2055 - protein, 14 aa, Artificial Sequence
  Synthetically generated peptide
CCCWCCNPACTGCY

SEQ ID NO: 2056 - protein, 14 aa, Artificial Sequence
  Synthetically generated peptide
CCNWCCNPACTGCY

SEQ ID NO: 2057 - protein, 14 aa, Artificial Sequence
  Synthetically generated peptide
CCQWCCNPACTGCY

SEQ ID NO: 2058 - protein, 14 aa, Artificial Sequence
  Synthetically generated peptide
CCYWCCNPACTGCY

SEQ ID NO: 2059 - protein, 14 aa, Artificial Sequence
  Synthetically generated peptide
CCDWCCNPACTGCY

SEQ ID NO: 2060 - protein, 14 aa, Artificial Sequence
  Synthetically generated peptide
CCKWCCNPACTGCY

SEQ ID NO: 2061 - protein, 14 aa, Artificial Sequence
  Synthetically generated peptide
CCRWCCNPACTGCY

SEQ ID NO: 2062 - protein, 14 aa, Artificial Sequence
  Synthetically generated peptide
CCHWCCNPACTGCY

SEQ ID NO: 2063 - protein, 13 aa, Artificial Sequence
  Synthetically generated peptide
CCAWCCNPACTGC

SEQ ID NO: 2064 - protein, 13 aa, Artificial Sequence
  Synthetically generated peptide
CCVWCCNPACTGC

SEQ ID NO: 2065 - protein, 13 aa, Artificial Sequence
  Synthetically generated peptide
CCLWCCNPACTGC

SEQ ID NO: 2066 - protein, 13 aa, Artificial Sequence
  Synthetically generated peptide
CCIWCCNPACTGC

SEQ ID NO: 2067 - protein, 13 aa, Artificial Sequence
  Synthetically generated peptide
CCMWCCNPACTGC

SEQ ID NO: 2068 - protein, 13 aa, Artificial Sequence
  Synthetically generated peptide
CCFWCCNPACTGC

SEQ ID NO: 2069 - protein, 13 aa, Artificial Sequence
  Synthetically generated peptide
CCWWCCNPACTGC

SEQ ID NO: 2070 - protein, 13 aa, Artificial Sequence
  Synthetically generated peptide
CCGWCCNPACTGC

SEQ ID NO: 2071 - protein, 13 aa, Artificial Sequence
  Synthetically generated peptide
CCSWCCNPACTGC

SEQ ID NO: 2072 - protein, 13 aa, Artificial Sequence
  Synthetically generated peptide
CCTWCCNPACTGC

SEQ ID NO: 2073 - protein, 13 aa, Artificial Sequence
  Synthetically generated peptide
CCCWCCNPACTGC

SEQ ID NO: 2074 - protein, 13 aa, Artificial Sequence
  Synthetically generated peptide
CCNWCCNPACTGC

SEQ ID NO: 2075 - protein, 13 aa, Artificial Sequence
  Synthetically generated peptide
CCQWCCNPACTGC

SEQ ID NO: 2076 - protein, 13 aa, Artificial Sequence
  Synthetically generated peptide
CCYWCCNPACTGC

SEQ ID NO: 2077 - protein, 13 aa, Artificial Sequence
  Synthetically generated peptide
CCDWCCNPACTGC

SEQ ID NO: 2078 - protein, 13 aa, Artificial Sequence
  Synthetically generated peptide
CCKWCCNPACTGC

SEQ ID NO: 2079 - protein, 13 aa, Artificial Sequence
  Synthetically generated peptide
CCRWCCNPACTGC

SEQ ID NO: 2080 - protein, 13 aa, Artificial Sequence
  Synthetically generated peptide
CCHWCCNPACTGC

SEQ ID NO: 2081 - protein, 20 aa, Artificial Sequence
  Synthetically generated peptide
GNLIDCCEICCNPACFGCLN

SEQ ID NO: 2082 - protein, 20 aa, Artificial Sequence
  Synthetically generated peptide
GNLIDRCEICCNPACFGCLN

SEQ ID NO: 2083 - protein, 23 aa, Artificial Sequence
  Synthetically generated peptide
PPAEVSSDWDCCDVCCNPACAGC

SEQ ID NO: 2084 - protein, 65 aa, Artificial Sequence
  Synthetically generated peptide
  VARIANT (2)..(5): Xaa = any amino acid (natural or non-natural), the same or diferent
  misc_feature (7)..(10): Xaa can be any naturally occurring amino acid
  misc_feature (12)..(15): Xaa can be any naturally occurring amino acid
  misc_feature (17)..(20): Xaa can be any naturally occurring amino acid
  misc_feature (22)..(25): Xaa can be any naturally occurring amino acid
  misc_feature (27)..(30): Xaa can be any naturally occurring amino acid
  misc_feature (32)..(35): Xaa can be any naturally occurring amino acid
  misc_feature (37)..(40): Xaa can be any naturally occurring amino acid
  misc_feature (42)..(45): Xaa can be any naturally occurring amino acid
  misc_feature (47)..(50): Xaa can be any naturally occurring amino acid
  misc_feature (52)..(55): Xaa can be any naturally occurring amino acid
  misc_feature (57)..(60): Xaa can be any naturally occurring amino acid
  misc_feature (62)..(65): Xaa can be any naturally occurring amino acid
CXXXXEXXXXYXXXXCXXXXCXXXXNXXXXPXXXXAXXXXCXXXXTXXXXGXXXXCXXXXYXXXX

SEQ ID NO: 2085 - protein, 16 aa, Artificial Sequence
  Synthetically generated peptide
NYCCELCCNPACTGCF

SEQ ID NO: 2086 - protein, 13 aa, Artificial Sequence
  Synthetically generated peptide
ACEACANPACTGC

SEQ ID NO: 2087 - protein, 13 aa, Artificial Sequence
  Synthetically generated peptide
ACERCANPACTGC

SEQ ID NO: 2088 - protein, 13 aa, Artificial Sequence
  Synthetically generated peptide
ACENCANPACTGC

SEQ ID NO: 2089 - protein, 13 aa, Artificial Sequence
  Synthetically generated peptide
ACEDCANPACTGC

SEQ ID NO: 2090 - protein, 13 aa, Artificial Sequence
  Synthetically generated peptide
ACECCANPACTGC

SEQ ID NO: 2091 - protein, 13 aa, Artificial Sequence
  Synthetically generated peptide
ACEQCANPACTGC

SEQ ID NO: 2092 - protein, 13 aa, Artificial Sequence
  Synthetically generated peptide
ACEECANPACTGC

SEQ ID NO: 2093 - protein, 13 aa, Artificial Sequence
  Synthetically generated peptide
ACEGCANPACTGC

SEQ ID NO: 2094 - protein, 13 aa, Artificial Sequence
  Synthetically generated peptide
ACEHCANPACTGC

SEQ ID NO: 2095 - protein, 13 aa, Artificial Sequence
  Synthetically generated peptide
ACEICANPACTGC

SEQ ID NO: 2096 - protein, 13 aa, Artificial Sequence
  Synthetically generated peptide
ACEKCANPACTGC

SEQ ID NO: 2097 - protein, 13 aa, Artificial Sequence
  Synthetically generated peptide
ACEMCANPACTGC

SEQ ID NO: 2098 - protein, 13 aa, Artificial Sequence
  Synthetically generated peptide
ACEFCANPACTGC

SEQ ID NO: 2099 - protein, 13 aa, Artificial Sequence
  Synthetically generated peptide
ACEPCANPACTGC

SEQ ID NO: 2100 - protein, 13 aa, Artificial Sequence
  Synthetically generated peptide
ACESCANPACTGC

SEQ ID NO: 2101 - protein, 13 aa, Artificial Sequence
  Synthetically generated peptide
ACETCANPACTGC

SEQ ID NO: 2102 - protein, 13 aa, Artificial Sequence
  Synthetically generated peptide
ACEWCANPACTGC

SEQ ID NO: 2103 - protein, 13 aa, Artificial Sequence
  Synthetically generated peptide
ACEYCANPACTGC

SEQ ID NO: 2104 - protein, 13 aa, Artificial Sequence
  Synthetically generated peptide
ACEVCANPACTGC

SEQ ID NO: 2105 - protein, 14 aa, Artificial Sequence
  Synthetically generated peptide
ACELCANPACTGCY

SEQ ID NO: 2106 - protein, 14 aa, Artificial Sequence
  Synthetically generated peptide
ACEACANPACTGCY

SEQ ID NO: 2107 - protein, 14 aa, Artificial Sequence
  Synthetically generated peptide
ACERCANPACTGCY

SEQ ID NO: 2108 - protein, 14 aa, Artificial Sequence
  Synthetically generated peptide
ACENCANPACTGCY

SEQ ID NO: 2109 - protein, 14 aa, Artificial Sequence
  Synthetically generated peptide
ACEDCANPACTGCY

SEQ ID NO: 2110 - protein, 14 aa, Artificial Sequence
  Synthetically generated peptide
ACECCANPACTGCY

SEQ ID NO: 2111 - protein, 14 aa, Artificial Sequence
  Synthetically generated peptide
ACEQCANPACTGCY

SEQ ID NO: 2112 - protein, 14 aa, Artificial Sequence
  Synthetically generated peptide
ACEECANPACTGCY

SEQ ID NO: 2113 - protein, 14 aa, Artificial Sequence
  Synthetically generated peptide
ACEGCANPACTGCY

SEQ ID NO: 2114 - protein, 14 aa, Artificial Sequence
  Synthetically generated peptide
ACEHCANPACTGCY

SEQ ID NO: 2115 - protein, 14 aa, Artificial Sequence
  Synthetically generated peptide
ACEICANPACTGCY

SEQ ID NO: 2116 - protein, 14 aa, Artificial Sequence
  Synthetically generated peptide
ACEKCANPACTGCY

SEQ ID NO: 2117 - protein, 14 aa, Artificial Sequence
  Synthetically generated peptide
ACEMCANPACTGCY

SEQ ID NO: 2118 - protein, 14 aa, Artificial Sequence
  Synthetically generated peptide
ACEFCANPACTGCY

SEQ ID NO: 2119 - protein, 14 aa, Artificial Sequence
  Synthetically generated peptide
ACEPCANPACTGCY

SEQ ID NO: 2120 - protein, 14 aa, Artificial Sequence
  Synthetically generated peptide
ACESCANPACTGCY

SEQ ID NO: 2121 - protein, 14 aa, Artificial Sequence
  Synthetically generated peptide
ACETCANPACTGCY

SEQ ID NO: 2122 - protein, 14 aa, Artificial Sequence
  Synthetically generated peptide
ACEWCANPACTGCY

SEQ ID NO: 2123 - protein, 14 aa, Artificial Sequence
  Synthetically generated peptide
ACEYCANPACTGCY

SEQ ID NO: 2124 - protein, 14 aa, Artificial Sequence
  Synthetically generated peptide
ACEVCANPACTGCY

SEQ ID NO: 2125 - protein, 13 aa, Artificial Sequence
  Synthetically generated peptide
ACELCCNPACTGC

SEQ ID NO: 2126 - protein, 13 aa, Artificial Sequence
  Synthetically generated peptide
ACEACCNPACTGC

SEQ ID NO: 2127 - protein, 13 aa, Artificial Sequence
  Synthetically generated peptide
ACERCCNPACTGC

SEQ ID NO: 2128 - protein, 13 aa, Artificial Sequence
  Synthetically generated peptide
ACENCCNPACTGC

SEQ ID NO: 2129 - protein, 13 aa, Artificial Sequence
  Synthetically generated peptide
ACEDCCNPACTGC

SEQ ID NO: 2130 - protein, 13 aa, Artificial Sequence
  Synthetically generated peptide
ACECCCNPACTGC

SEQ ID NO: 2131 - protein, 13 aa, Artificial Sequence
  Synthetically generated peptide
ACEQCCNPACTGC

SEQ ID NO: 2132 - protein, 13 aa, Artificial Sequence
  Synthetically generated peptide
ACEECCNPACTGC

SEQ ID NO: 2133 - protein, 13 aa, Artificial Sequence
  Synthetically generated peptide
ACEGCCNPACTGC

SEQ ID NO: 2134 - protein, 13 aa, Artificial Sequence
  Synthetically generated peptide
ACEHCCNPACTGC

SEQ ID NO: 2135 - protein, 13 aa, Artificial Sequence
  Synthetically generated peptide
ACEICCNPACTGC

SEQ ID NO: 2136 - protein, 13 aa, Artificial Sequence
  Synthetically generated peptide
ACEKCCNPACTGC

SEQ ID NO: 2137 - protein, 13 aa, Artificial Sequence
  Synthetically generated peptide
ACEMCCNPACTGC

SEQ ID NO: 2138 - protein, 13 aa, Artificial Sequence
  Synthetically generated peptide
ACEFCCNPACTGC

SEQ ID NO: 2139 - protein, 13 aa, Artificial Sequence
  Synthetically generated peptide
ACEPCCNPACTGC

SEQ ID NO: 2140 - protein, 13 aa, Artificial Sequence
  Synthetically generated peptide
ACESCCNPACTGC

SEQ ID NO: 2141 - protein, 13 aa, Artificial Sequence
  Synthetically generated peptide
ACETCCNPACTGC

SEQ ID NO: 2142 - protein, 13 aa, Artificial Sequence
  Synthetically generated peptide
ACEWCCNPACTGC

SEQ ID NO: 2143 - protein, 13 aa, Artificial Sequence
  Synthetically generated peptide
ACEYCCNPACTGC

SEQ ID NO: 2144 - protein, 13 aa, Artificial Sequence
  Synthetically generated peptide
ACEVCCNPACTGC

SEQ ID NO: 2145 - protein, 14 aa, Artificial Sequence
  Synthetically generated peptide
ACELCCNPACTGCY

SEQ ID NO: 2146 - protein, 14 aa, Artificial Sequence
  Synthetically generated peptide
ACEACCNPACTGCY

SEQ ID NO: 2147 - protein, 14 aa, Artificial Sequence
  Synthetically generated peptide
ACERCCNPACTGCY

SEQ ID NO: 2148 - protein, 14 aa, Artificial Sequence
  Synthetically generated peptide
ACENCCNPACTGCY

SEQ ID NO: 2149 - protein, 14 aa, Artificial Sequence
  Synthetically generated peptide
ACEDCCNPACTGCY

SEQ ID NO: 2150 - protein, 14 aa, Artificial Sequence
  Synthetically generated peptide
ACECCCNPACTGCY

SEQ ID NO: 2151 - protein, 14 aa, Artificial Sequence
  Synthetically generated peptide
ACEQCCNPACTGCY

SEQ ID NO: 2152 - protein, 14 aa, Artificial Sequence
  Synthetically generated peptide
ACEECCNPACTGCY

SEQ ID NO: 2153 - protein, 14 aa, Artificial Sequence
  Synthetically generated peptide
ACEGCCNPACTGCY

SEQ ID NO: 2154 - protein, 14 aa, Artificial Sequence
  Synthetically generated peptide
ACEHCCNPACTGCY

SEQ ID NO: 2155 - protein, 14 aa, Artificial Sequence
  Synthetically generated peptide
ACEICCNPACTGCY

SEQ ID NO: 2156 - protein, 14 aa, Artificial Sequence
  Synthetically generated peptide
ACEKCCNPACTGCY

SEQ ID NO: 2157 - protein, 14 aa, Artificial Sequence
  Synthetically generated peptide
ACEMCCNPACTGCY

SEQ ID NO: 2158 - protein, 14 aa, Artificial Sequence
  Synthetically generated peptide
ACEFCCNPACTGCY

SEQ ID NO: 2159 - protein, 14 aa, Artificial Sequence
  Synthetically generated peptide
ACEPCCNPACTGCY

SEQ ID NO: 2160 - protein, 14 aa, Artificial Sequence
  Synthetically generated peptide
ACESCCNPACTGCY

SEQ ID NO: 2161 - protein, 14 aa, Artificial Sequence
  Synthetically generated peptide
ACETCCNPACTGCY

SEQ ID NO: 2162 - protein, 14 aa, Artificial Sequence
  Synthetically generated peptide
ACEWCCNPACTGCY

SEQ ID NO: 2163 - protein, 14 aa, Artificial Sequence
  Synthetically generated peptide
ACEYCCNPACTGCY

SEQ ID NO: 2164 - protein, 14 aa, Artificial Sequence
  Synthetically generated peptide
ACEVCCNPACTGCY

SEQ ID NO: 2165 - protein, 13 aa, Artificial Sequence
  Synthetically generated peptide
CCELCANPACTGC

SEQ ID NO: 2166 - protein, 13 aa, Artificial Sequence
  Synthetically generated peptide
CCEACANPACTGC

SEQ ID NO: 2167 - protein, 13 aa, Artificial Sequence
  Synthetically generated peptide
CCERCANPACTGC

SEQ ID NO: 2168 - protein, 13 aa, Artificial Sequence
  Synthetically generated peptide
CCENCANPACTGC

SEQ ID NO: 2169 - protein, 13 aa, Artificial Sequence
  Synthetically generated peptide
CCEDCANPACTGC

SEQ ID NO: 2170 - protein, 13 aa, Artificial Sequence
  Synthetically generated peptide
CCECCANPACTGC

SEQ ID NO: 2171 - protein, 13 aa, Artificial Sequence
  Synthetically generated peptide
CCEQCANPACTGC

SEQ ID NO: 2172 - protein, 13 aa, Artificial Sequence
  Synthetically generated peptide
CCEECANPACTGC

SEQ ID NO: 2173 - protein, 13 aa, Artificial Sequence
  Synthetically generated peptide
CCEGCANPACTGC

SEQ ID NO: 2174 - protein, 13 aa, Artificial Sequence
  Synthetically generated peptide
CCEHCANPACTGC

SEQ ID NO: 2175 - protein, 13 aa, Artificial Sequence
  Synthetically generated peptide
CCEICANPACTGC

SEQ ID NO: 2176 - protein, 13 aa, Artificial Sequence
  Synthetically generated peptide
CCEKCANPACTGC

SEQ ID NO: 2177 - protein, 13 aa, Artificial Sequence
  Synthetically generated peptide
CCEMCANPACTGC

SEQ ID NO: 2178 - protein, 13 aa, Artificial Sequence
  Synthetically generated peptide
CCEFCANPACTGC

SEQ ID NO: 2179 - protein, 13 aa, Artificial Sequence
  Synthetically generated peptide
CCEPCANPACTGC

SEQ ID NO: 2180 - protein, 13 aa, Artificial Sequence
  Synthetically generated peptide
CCESCANPACTGC

SEQ ID NO: 2181 - protein, 13 aa, Artificial Sequence
  Synthetically generated peptide
CCETCANPACTGC

SEQ ID NO: 2182 - protein, 13 aa, Artificial Sequence
  Synthetically generated peptide
CCEWCANPACTGC

SEQ ID NO: 2183 - protein, 13 aa, Artificial Sequence
  Synthetically generated peptide
CCEYCANPACTGC

SEQ ID NO: 2184 - protein, 13 aa, Artificial Sequence
  Synthetically generated peptide
CCEVCANPACTGC

SEQ ID NO: 2185 - protein, 14 aa, Artificial Sequence
  Synthetically generated peptide
CCELCANPACTGCY

SEQ ID NO: 2186 - protein, 14 aa, Artificial Sequence
  Synthetically generated peptide
CCEACANPACTGCY

SEQ ID NO: 2187 - protein, 14 aa, Artificial Sequence
  Synthetically generated peptide
CCERCANPACTGCY

SEQ ID NO: 2188 - protein, 14 aa, Artificial Sequence
  Synthetically generated peptide
CCENCANPACTGCY

SEQ ID NO: 2189 - protein, 14 aa, Artificial Sequence
  Synthetically generated peptide
CCEDCANPACTGCY

SEQ ID NO: 2190 - protein, 14 aa, Artificial Sequence
  Synthetically generated peptide
CCECCANPACTGCY

SEQ ID NO: 2191 - protein, 14 aa, Artificial Sequence
  Synthetically generated peptide
CCEQCANPACTGCY

SEQ ID NO: 2192 - protein, 14 aa, Artificial Sequence
  Synthetically generated peptide
CCEECANPACTGCY

SEQ ID NO: 2193 - protein, 14 aa, Artificial Sequence
  Synthetically generated peptide
CCEGCANPACTGCY

SEQ ID NO: 2194 - protein, 14 aa, Artificial Sequence
  Synthetically generated peptide
CCEHCANPACTGCY

SEQ ID NO: 2195 - protein, 14 aa, Artificial Sequence
  Synthetically generated peptide
CCEICANPACTGCY

SEQ ID NO: 2196 - protein, 14 aa, Artificial Sequence
  Synthetically generated peptide
CCEKCANPACTGCY

SEQ ID NO: 2197 - protein, 14 aa, Artificial Sequence
  Synthetically generated peptide
CCEMCANPACTGCY

SEQ ID NO: 2198 - protein, 14 aa, Artificial Sequence
  Synthetically generated peptide
CCEFCANPACTGCY

SEQ ID NO: 2199 - protein, 14 aa, Artificial Sequence
  Synthetically generated peptide
CCEPCANPACTGCY

SEQ ID NO: 2200 - protein, 14 aa, Artificial Sequence
  Synthetically generated peptide
CCESCANPACTGCY

SEQ ID NO: 2201 - protein, 14 aa, Artificial Sequence
  Synthetically generated peptide
CCETCANPACTGCY

SEQ ID NO: 2202 - protein, 14 aa, Artificial Sequence
  Synthetically generated peptide
CCEWCANPACTGCY

SEQ ID NO: 2203 - protein, 14 aa, Artificial Sequence
  Synthetically generated peptide
CCEYCANPACTGCY

SEQ ID NO: 2204 - protein, 14 aa, Artificial Sequence
  Synthetically generated peptide
CCEVCANPACTGCY

SEQ ID NO: 2205 - protein, 13 aa, Artificial Sequence
  Synthetically generated peptide
GCELCGNPACTGC

SEQ ID NO: 2206 - protein, 13 aa, Artificial Sequence
  Synthetically generated peptide
GCEACGNPACTGC

SEQ ID NO: 2207 - protein, 13 aa, Artificial Sequence
  Synthetically generated peptide
GCERCGNPACTGC

SEQ ID NO: 2208 - protein, 13 aa, Artificial Sequence
  Synthetically generated peptide
GCENCGNPACTGC

SEQ ID NO: 2209 - protein, 13 aa, Artificial Sequence
  Synthetically generated peptide
GCEDCGNPACTGC

SEQ ID NO: 2210 - protein, 13 aa, Artificial Sequence
  Synthetically generated peptide
GCECCGNPACTGC

SEQ ID NO: 2211 - protein, 13 aa, Artificial Sequence
  Synthetically generated peptide
GCEQCGNPACTGC

SEQ ID NO: 2212 - protein, 13 aa, Artificial Sequence
  Synthetically generated peptide
GCEECGNPACTGC

SEQ ID NO: 2213 - protein, 13 aa, Artificial Sequence
  Synthetically generated peptide
GCEGCGNPACTGC

SEQ ID NO: 2214 - protein, 13 aa, Artificial Sequence
  Synthetically generated peptide
GCEHCGNPACTGC

SEQ ID NO: 2215 - protein, 13 aa, Artificial Sequence
  Synthetically generated peptide
GCEICGNPACTGC

SEQ ID NO: 2216 - protein, 13 aa, Artificial Sequence
  Synthetically generated peptide
GCEKCGNPACTGC

SEQ ID NO: 2217 - protein, 13 aa, Artificial Sequence
  Synthetically generated peptide
GCEMCGNPACTGC

SEQ ID NO: 2218 - protein, 13 aa, Artificial Sequence
  Synthetically generated peptide
GCEFCGNPACTGC

SEQ ID NO: 2219 - protein, 13 aa, Artificial Sequence
  Synthetically generated peptide
GCEPCGNPACTGC

SEQ ID NO: 2220 - protein, 13 aa, Artificial Sequence
  Synthetically generated peptide
GCESCGNPACTGC

SEQ ID NO: 2221 - protein, 13 aa, Artificial Sequence
  Synthetically generated peptide
GCETCGNPACTGC

SEQ ID NO: 2222 - protein, 13 aa, Artificial Sequence
  Synthetically generated peptide
GCEWCGNPACTGC

SEQ ID NO: 2223 - protein, 13 aa, Artificial Sequence
  Synthetically generated peptide
GCEYCGNPACTGC

SEQ ID NO: 2224 - protein, 13 aa, Artificial Sequence
  Synthetically generated peptide
GCEVCGNPACTGC

SEQ ID NO: 2225 - protein, 14 aa, Artificial Sequence
  Synthetically generated peptide
GCELCGNPACTGCY

SEQ ID NO: 2226 - protein, 14 aa, Artificial Sequence
  Synthetically generated peptide
GCEACGNPACTGCY

SEQ ID NO: 2227 - protein, 14 aa, Artificial Sequence
  Synthetically generated peptide
GCERCGNPACTGCY

SEQ ID NO: 2228 - protein, 14 aa, Artificial Sequence
  Synthetically generated peptide
GCENCGNPACTGCY

SEQ ID NO: 2229 - protein, 14 aa, Artificial Sequence
  Synthetically generated peptide
GCEDCGNPACTGCY

SEQ ID NO: 2230 - protein, 14 aa, Artificial Sequence
  Synthetically generated peptide
GCECCGNPACTGCY

SEQ ID NO: 2231 - protein, 14 aa, Artificial Sequence
  Synthetically generated peptide
GCEQCGNPACTGCY

SEQ ID NO: 2232 - protein, 14 aa, Artificial Sequence
  Synthetically generated peptide
GCEECGNPACTGCY

SEQ ID NO: 2233 - protein, 14 aa, Artificial Sequence
  Synthetically generated peptide
GCEGCGNPACTGCY

SEQ ID NO: 2234 - protein, 14 aa, Artificial Sequence
  Synthetically generated peptide
GCEHCGNPACTGCY

SEQ ID NO: 2235 - protein, 14 aa, Artificial Sequence
  Synthetically generated peptide
GCEICGNPACTGCY

SEQ ID NO: 2236 - protein, 14 aa, Artificial Sequence
  Synthetically generated peptide
GCEKCGNPACTGCY

SEQ ID NO: 2237 - protein, 14 aa, Artificial Sequence
  Synthetically generated peptide
GCEMCGNPACTGCY

SEQ ID NO: 2238 - protein, 14 aa, Artificial Sequence
  Synthetically generated peptide
GCEFCGNPACTGCY

SEQ ID NO: 2239 - protein, 14 aa, Artificial Sequence
  Synthetically generated peptide
GCEPCGNPACTGCY

SEQ ID NO: 2240 - protein, 14 aa, Artificial Sequence
  Synthetically generated peptide
GCESCGNPACTGCY

SEQ ID NO: 2241 - protein, 14 aa, Artificial Sequence
  Synthetically generated peptide
GCETCGNPACTGCY

SEQ ID NO: 2242 - protein, 14 aa, Artificial Sequence
  Synthetically generated peptide
GCEWCGNPACTGCY

SEQ ID NO: 2243 - protein, 14 aa, Artificial Sequence
  Synthetically generated peptide
GCEYCGNPACTGCY

SEQ ID NO: 2244 - protein, 14 aa, Artificial Sequence
  Synthetically generated peptide
GCEVCGNPACTGCY

SEQ ID NO: 2245 - protein, 13 aa, Artificial Sequence
  Synthetically generated peptide
GCELCCNPACTGC

SEQ ID NO: 2246 - protein, 13 aa, Artificial Sequence
  Synthetically generated peptide
GCEACCNPACTGC

SEQ ID NO: 2247 - protein, 13 aa, Artificial Sequence
  Synthetically generated peptide
GCERCCNPACTGC

SEQ ID NO: 2248 - protein, 13 aa, Artificial Sequence
  Synthetically generated peptide
GCENCCNPACTGC

SEQ ID NO: 2249 - protein, 13 aa, Artificial Sequence
  Synthetically generated peptide
GCEDCCNPACTGC

SEQ ID NO: 2250 - protein, 13 aa, Artificial Sequence
  Synthetically generated peptide
GCECCCNPACTGC

SEQ ID NO: 2251 - protein, 13 aa, Artificial Sequence
  Synthetically generated peptide
GCEQCCNPACTGC

SEQ ID NO: 2252 - protein, 13 aa, Artificial Sequence
  Synthetically generated peptide
GCEECCNPACTGC

SEQ ID NO: 2253 - protein, 13 aa, Artificial Sequence
  Synthetically generated peptide
GCEGCCNPACTGC

SEQ ID NO: 2254 - protein, 13 aa, Artificial Sequence
  Synthetically generated peptide
GCEHCCNPACTGC

SEQ ID NO: 2255 - protein, 13 aa, Artificial Sequence
  Synthetically generated peptide
GCEICCNPACTGC

SEQ ID NO: 2256 - protein, 13 aa, Artificial Sequence
  Synthetically generated peptide
GCEKCCNPACTGC

SEQ ID NO: 2257 - protein, 13 aa, Artificial Sequence
  Synthetically generated peptide
GCEMCCNPACTGC

SEQ ID NO: 2258 - protein, 13 aa, Artificial Sequence
  Synthetically generated peptide
GCEFCCNPACTGC

SEQ ID NO: 2259 - protein, 13 aa, Artificial Sequence
  Synthetically generated peptide
GCEPCCNPACTGC

SEQ ID NO: 2260 - protein, 13 aa, Artificial Sequence
  Synthetically generated peptide
GCESCCNPACTGC

SEQ ID NO: 2261 - protein, 13 aa, Artificial Sequence
  Synthetically generated peptide
GCETCCNPACTGC

SEQ ID NO: 2262 - protein, 13 aa, Artificial Sequence
  Synthetically generated peptide
GCEWCCNPACTGC

SEQ ID NO: 2263 - protein, 13 aa, Artificial Sequence
  Synthetically generated peptide
GCEYCCNPACTGC

SEQ ID NO: 2264 - protein, 13 aa, Artificial Sequence
  Synthetically generated peptide
GCEVCCNPACTGC

SEQ ID NO: 2265 - protein, 14 aa, Artificial Sequence
  Synthetically generated peptide
GCELCCNPACTGCY

SEQ ID NO: 2266 - protein, 14 aa, Artificial Sequence
  Synthetically generated peptide
GCEACCNPACTGCY

SEQ ID NO: 2267 - protein, 14 aa, Artificial Sequence
  Synthetically generated peptide
GCERCCNPACTGCY

SEQ ID NO: 2268 - protein, 14 aa, Artificial Sequence
  Synthetically generated peptide
GCENCCNPACTGCY

SEQ ID NO: 2269 - protein, 14 aa, Artificial Sequence
  Synthetically generated peptide
GCEDCCNPACTGCY

SEQ ID NO: 2270 - protein, 14 aa, Artificial Sequence
  Synthetically generated peptide
GCECCCNPACTGCY

SEQ ID NO: 2271 - protein, 14 aa, Artificial Sequence
  Synthetically generated peptide
GCEQCCNPACTGCY

SEQ ID NO: 2272 - protein, 14 aa, Artificial Sequence
  Synthetically generated peptide
GCEECCNPACTGCY

SEQ ID NO: 2273 - protein, 14 aa, Artificial Sequence
  Synthetically generated peptide
GCEGCCNPACTGCY

SEQ ID NO: 2274 - protein, 14 aa, Artificial Sequence
  Synthetically generated peptide
GCEHCCNPACTGCY

SEQ ID NO: 2275 - protein, 14 aa, Artificial Sequence
  Synthetically generated peptide
GCEICCNPACTGCY

SEQ ID NO: 2276 - protein, 14 aa, Artificial Sequence
  Synthetically generated peptide
GCEKCCNPACTGCY

SEQ ID NO: 2277 - protein, 14 aa, Artificial Sequence
  Synthetically generated peptide
GCEMCCNPACTGCY

SEQ ID NO: 2278 - protein, 14 aa, Artificial Sequence
  Synthetically generated peptide
GCEFCCNPACTGCY

SEQ ID NO: 2279 - protein, 14 aa, Artificial Sequence
  Synthetically generated peptide
GCEPCCNPACTGCY

SEQ ID NO: 2280 - protein, 14 aa, Artificial Sequence
  Synthetically generated peptide
GCESCCNPACTGCY

SEQ ID NO: 2281 - protein, 14 aa, Artificial Sequence
  Synthetically generated peptide
GCETCCNPACTGCY

SEQ ID NO: 2282 - protein, 14 aa, Artificial Sequence
  Synthetically generated peptide
GCEWCCNPACTGCY

SEQ ID NO: 2283 - protein, 14 aa, Artificial Sequence
  Synthetically generated peptide
GCEYCCNPACTGCY

SEQ ID NO: 2284 - protein, 14 aa, Artificial Sequence
  Synthetically generated peptide
GCEVCCNPACTGCY

SEQ ID NO: 2285 - protein, 13 aa, Artificial Sequence
  Synthetically generated peptide
CCELCGNPACTGC

SEQ ID NO: 2286 - protein, 13 aa, Artificial Sequence
  Synthetically generated peptide
CCEACGNPACTGC

SEQ ID NO: 2287 - protein, 13 aa, Artificial Sequence
  Synthetically generated peptide
CCERCGNPACTGC

SEQ ID NO: 2288 - protein, 13 aa, Artificial Sequence
  Synthetically generated peptide
CCENCGNPACTGC

SEQ ID NO: 2289 - protein, 13 aa, Artificial Sequence
  Synthetically generated peptide
CCEDCGNPACTGC

SEQ ID NO: 2290 - protein, 13 aa, Artificial Sequence
  Synthetically generated peptide
CCECCGNPACTGC

SEQ ID NO: 2291 - protein, 13 aa, Artificial Sequence
  Synthetically generated peptide
CCEQCGNPACTGC

SEQ ID NO: 2292 - protein, 13 aa, Artificial Sequence
  Synthetically generated peptide
CCEECGNPACTGC

SEQ ID NO: 2293 - protein, 13 aa, Artificial Sequence
  Synthetically generated peptide
CCEGCGNPACTGC

SEQ ID NO: 2294 - protein, 13 aa, Artificial Sequence
  Synthetically generated peptide
CCEHCGNPACTGC

SEQ ID NO: 2295 - protein, 13 aa, Artificial Sequence
  Synthetically generated peptide
CCEICGNPACTGC

SEQ ID NO: 2296 - protein, 13 aa, Artificial Sequence
  Synthetically generated peptide
CCEKCGNPACTGC

SEQ ID NO: 2297 - protein, 13 aa, Artificial Sequence
  Synthetically generated peptide
CCEMCGNPACTGC

SEQ ID NO: 2298 - protein, 13 aa, Artificial Sequence
  Synthetically generated peptide
CCEFCGNPACTGC

SEQ ID NO: 2299 - protein, 13 aa, Artificial Sequence
  Synthetically generated peptide
CCEPCGNPACTGC

SEQ ID NO: 2300 - protein, 13 aa, Artificial Sequence
  Synthetically generated peptide
CCESCGNPACTGC

SEQ ID NO: 2301 - protein, 13 aa, Artificial Sequence
  Synthetically generated peptide
CCETCGNPACTGC

SEQ ID NO: 2302 - protein, 13 aa, Artificial Sequence
  Synthetically generated peptide
CCEWCGNPACTGC

SEQ ID NO: 2303 - protein, 13 aa, Artificial Sequence
  Synthetically generated peptide
CCEYCGNPACTGC

SEQ ID NO: 2304 - protein, 13 aa, Artificial Sequence
  Synthetically generated peptide
CCEVCGNPACTGC

SEQ ID NO: 2305 - protein, 14 aa, Artificial Sequence
  Synthetically generated peptide
CCELCGNPACTGCY

SEQ ID NO: 2306 - protein, 14 aa, Artificial Sequence
  Synthetically generated peptide
CCEACGNPACTGCY

SEQ ID NO: 2307 - protein, 14 aa, Artificial Sequence
  Synthetically generated peptide
CCERCGNPACTGCY

SEQ ID NO: 2308 - protein, 14 aa, Artificial Sequence
  Synthetically generated peptide
CCENCGNPACTGCY

SEQ ID NO: 2309 - protein, 14 aa, Artificial Sequence
  Synthetically generated peptide
CCEDCGNPACTGCY

SEQ ID NO: 2310 - protein, 14 aa, Artificial Sequence
  Synthetically generated peptide
CCECCGNPACTGCY

SEQ ID NO: 2311 - protein, 14 aa, Artificial Sequence
  Synthetically generated peptide
CCEQCGNPACTGCY

SEQ ID NO: 2312 - protein, 14 aa, Artificial Sequence
  Synthetically generated peptide
CCEECGNPACTGCY

SEQ ID NO: 2313 - protein, 14 aa, Artificial Sequence
  Synthetically generated peptide
CCEGCGNPACTGCY

SEQ ID NO: 2314 - protein, 14 aa, Artificial Sequence
  Synthetically generated peptide
CCEHCGNPACTGCY

SEQ ID NO: 2315 - protein, 14 aa, Artificial Sequence
  Synthetically generated peptide
CCEICGNPACTGCY

SEQ ID NO: 2316 - protein, 14 aa, Artificial Sequence
  Synthetically generated peptide
CCEKCGNPACTGCY

SEQ ID NO: 2317 - protein, 14 aa, Artificial Sequence
  Synthetically generated peptide
CCEMCGNPACTGCY

SEQ ID NO: 2318 - protein, 14 aa, Artificial Sequence
  Synthetically generated peptide
CCEFCGNPACTGCY

SEQ ID NO: 2319 - protein, 14 aa, Artificial Sequence
  Synthetically generated peptide
CCEPCGNPACTGCY

SEQ ID NO: 2320 - protein, 14 aa, Artificial Sequence
  Synthetically generated peptide
CCESCGNPACTGCY

SEQ ID NO: 2321 - protein, 14 aa, Artificial Sequence
  Synthetically generated peptide
CCETCGNPACTGCY

SEQ ID NO: 2322 - protein, 14 aa, Artificial Sequence
  Synthetically generated peptide
CCEWCGNPACTGCY

SEQ ID NO: 2323 - protein, 14 aa, Artificial Sequence
  Synthetically generated peptide
CCEYCGNPACTGCY

SEQ ID NO: 2324 - protein, 14 aa, Artificial Sequence
  Synthetically generated peptide
CCEVCGNPACTGCY

SEQ ID NO: 2325 - protein, 13 aa, Artificial Sequence
  Synthetically generated peptide
ACELCGNPACTGC

SEQ ID NO: 2326 - protein, 13 aa, Artificial Sequence
  Synthetically generated peptide
ACEACGNPACTGC

SEQ ID NO: 2327 - protein, 13 aa, Artificial Sequence
  Synthetically generated peptide
ACERCGNPACTGC

SEQ ID NO: 2328 - protein, 13 aa, Artificial Sequence
  Synthetically generated peptide
ACENCGNPACTGC

SEQ ID NO: 2329 - protein, 13 aa, Artificial Sequence
  Synthetically generated peptide
ACEDCGNPACTGC

SEQ ID NO: 2330 - protein, 13 aa, Artificial Sequence
  Synthetically generated peptide
ACECCGNPACTGC

SEQ ID NO: 2331 - protein, 13 aa, Artificial Sequence
  Synthetically generated peptide
ACEQCGNPACTGC

SEQ ID NO: 2332 - protein, 13 aa, Artificial Sequence
  Synthetically generated peptide
ACEECGNPACTGC

SEQ ID NO: 2333 - protein, 13 aa, Artificial Sequence
  Synthetically generated peptide
ACEGCGNPACTGC

SEQ ID NO: 2334 - protein, 13 aa, Artificial Sequence
  Synthetically generated peptide
ACEHCGNPACTGC

SEQ ID NO: 2335 - protein, 13 aa, Artificial Sequence
  Synthetically generated peptide
ACEICGNPACTGC

SEQ ID NO: 2336 - protein, 13 aa, Artificial Sequence
  Synthetically generated peptide
ACEKCGNPACTGC

SEQ ID NO: 2337 - protein, 13 aa, Artificial Sequence
  Synthetically generated peptide
ACEMCGNPACTGC

SEQ ID NO: 2338 - protein, 13 aa, Artificial Sequence
  Synthetically generated peptide
ACEFCGNPACTGC

SEQ ID NO: 2339 - protein, 13 aa, Artificial Sequence
  Synthetically generated peptide
ACEPCGNPACTGC

SEQ ID NO: 2340 - protein, 13 aa, Artificial Sequence
  Synthetically generated peptide
ACESCGNPACTGC

SEQ ID NO: 2341 - protein, 13 aa, Artificial Sequence
  Synthetically generated peptide
ACETCGNPACTGC

SEQ ID NO: 2342 - protein, 13 aa, Artificial Sequence
  Synthetically generated peptide
ACEWCGNPACTGC

SEQ ID NO: 2343 - protein, 13 aa, Artificial Sequence
  Synthetically generated peptide
ACEYCGNPACTGC

SEQ ID NO: 2344 - protein, 13 aa, Artificial Sequence
  Synthetically generated peptide
ACEVCGNPACTGC

SEQ ID NO: 2345 - protein, 14 aa, Artificial Sequence
  Synthetically generated peptide
ACELCGNPACTGCY

SEQ ID NO: 2346 - protein, 14 aa, Artificial Sequence
  Synthetically generated peptide
ACEACGNPACTGCY

SEQ ID NO: 2347 - protein, 14 aa, Artificial Sequence
  Synthetically generated peptide
ACERCGNPACTGCY

SEQ ID NO: 2348 - protein, 14 aa, Artificial Sequence
  Synthetically generated peptide
ACENCGNPACTGCY

SEQ ID NO: 2349 - protein, 14 aa, Artificial Sequence
  Synthetically generated peptide
ACEDCGNPACTGCY

SEQ ID NO: 2350 - protein, 14 aa, Artificial Sequence
  Synthetically generated peptide
ACECCGNPACTGCY

SEQ ID NO: 2351 - protein, 14 aa, Artificial Sequence
  Synthetically generated peptide
ACEQCGNPACTGCY

SEQ ID NO: 2352 - protein, 14 aa, Artificial Sequence
  Synthetically generated peptide
ACEECGNPACTGCY

SEQ ID NO: 2353 - protein, 14 aa, Artificial Sequence
  Synthetically generated peptide
ACEGCGNPACTGCY

SEQ ID NO: 2354 - protein, 14 aa, Artificial Sequence
  Synthetically generated peptide
ACEHCGNPACTGCY

SEQ ID NO: 2355 - protein, 14 aa, Artificial Sequence
  Synthetically generated peptide
ACEICGNPACTGCY

SEQ ID NO: 2356 - protein, 14 aa, Artificial Sequence
  Synthetically generated peptide
ACEKCGNPACTGCY

SEQ ID NO: 2357 - protein, 14 aa, Artificial Sequence
  Synthetically generated peptide
ACEMCGNPACTGCY

SEQ ID NO: 2358 - protein, 14 aa, Artificial Sequence
  Synthetically generated peptide
ACEFCGNPACTGCY

SEQ ID NO: 2359 - protein, 14 aa, Artificial Sequence
  Synthetically generated peptide
ACEPCGNPACTGCY

SEQ ID NO: 2360 - protein, 14 aa, Artificial Sequence
  Synthetically generated peptide
ACESCGNPACTGCY

SEQ ID NO: 2361 - protein, 14 aa, Artificial Sequence
  Synthetically generated peptide
ACETCGNPACTGCY

SEQ ID NO: 2362 - protein, 14 aa, Artificial Sequence
  Synthetically generated peptide
ACEWCGNPACTGCY

SEQ ID NO: 2363 - protein, 14 aa, Artificial Sequence
  Synthetically generated peptide
ACEYCGNPACTGCY

SEQ ID NO: 2364 - protein, 14 aa, Artificial Sequence
  Synthetically generated peptide
ACEVCGNPACTGCY

SEQ ID NO: 2365 - protein, 13 aa, Artificial Sequence
  Synthetically generated peptide
GCELCANPACTGC

SEQ ID NO: 2366 - protein, 13 aa, Artificial Sequence
  Synthetically generated peptide
GCEACANPACTGC

SEQ ID NO: 2367 - protein, 13 aa, Artificial Sequence
  Synthetically generated peptide
GCERCANPACTGC

SEQ ID NO: 2368 - protein, 13 aa, Artificial Sequence
  Synthetically generated peptide
GCENCANPACTGC

SEQ ID NO: 2369 - protein, 13 aa, Artificial Sequence
  Synthetically generated peptide
GCEDCANPACTGC

SEQ ID NO: 2370 - protein, 13 aa, Artificial Sequence
  Synthetically generated peptide
GCECCANPACTGC

SEQ ID NO: 2371 - protein, 13 aa, Artificial Sequence
  Synthetically generated peptide
GCEQCANPACTGC

SEQ ID NO: 2372 - protein, 13 aa, Artificial Sequence
  Synthetically generated peptide
GCEECANPACTGC

SEQ ID NO: 2373 - protein, 13 aa, Artificial Sequence
  Synthetically generated peptide
GCEGCANPACTGC

SEQ ID NO: 2374 - protein, 13 aa, Artificial Sequence
  Synthetically generated peptide
GCEHCANPACTGC

SEQ ID NO: 2375 - protein, 13 aa, Artificial Sequence
  Synthetically generated peptide
GCEICANPACTGC

SEQ ID NO: 2376 - protein, 13 aa, Artificial Sequence
  Synthetically generated peptide
GCEKCANPACTGC

SEQ ID NO: 2377 - protein, 13 aa, Artificial Sequence
  Synthetically generated peptide
GCEMCANPACTGC

SEQ ID NO: 2378 - protein, 13 aa, Artificial Sequence
  Synthetically generated peptide
GCEFCANPACTGC

SEQ ID NO: 2379 - protein, 13 aa, Artificial Sequence
  Synthetically generated peptide
GCEPCANPACTGC

SEQ ID NO: 2380 - protein, 13 aa, Artificial Sequence
  Synthetically generated peptide
GCESCANPACTGC

SEQ ID NO: 2381 - protein, 13 aa, Artificial Sequence
  Synthetically generated peptide
GCETCANPACTGC

SEQ ID NO: 2382 - protein, 13 aa, Artificial Sequence
  Synthetically generated peptide
GCEWCANPACTGC

SEQ ID NO: 2383 - protein, 13 aa, Artificial Sequence
  Synthetically generated peptide
GCEYCANPACTGC

SEQ ID NO: 2384 - protein, 13 aa, Artificial Sequence
  Synthetically generated peptide
GCEVCANPACTGC

SEQ ID NO: 2385 - protein, 14 aa, Artificial Sequence
  Synthetically generated peptide
GCELCANPACTGCY

SEQ ID NO: 2386 - protein, 14 aa, Artificial Sequence
  Synthetically generated peptide
GCEACANPACTGCY

SEQ ID NO: 2387 - protein, 14 aa, Artificial Sequence
  Synthetically generated peptide
GCERCANPACTGCY

SEQ ID NO: 2388 - protein, 14 aa, Artificial Sequence
  Synthetically generated peptide
GCENCANPACTGCY

SEQ ID NO: 2389 - protein, 14 aa, Artificial Sequence
  Synthetically generated peptide
GCEDCANPACTGCY

SEQ ID NO: 2390 - protein, 14 aa, Artificial Sequence
  Synthetically generated peptide
GCECCANPACTGCY

SEQ ID NO: 2391 - protein, 14 aa, Artificial Sequence
  Synthetically generated peptide
GCEQCANPACTGCY

SEQ ID NO: 2392 - protein, 14 aa, Artificial Sequence
  Synthetically generated peptide
GCEECANPACTGCY

SEQ ID NO: 2393 - protein, 14 aa, Artificial Sequence
  Synthetically generated peptide
GCEGCANPACTGCY

SEQ ID NO: 2394 - protein, 14 aa, Artificial Sequence
  Synthetically generated peptide
GCEHCANPACTGCY

SEQ ID NO: 2395 - protein, 14 aa, Artificial Sequence
  Synthetically generated peptide
GCEICANPACTGCY

SEQ ID NO: 2396 - protein, 14 aa, Artificial Sequence
  Synthetically generated peptide
GCEKCANPACTGCY

SEQ ID NO: 2397 - protein, 14 aa, Artificial Sequence
  Synthetically generated peptide
GCEMCANPACTGCY

SEQ ID NO: 2398 - protein, 14 aa, Artificial Sequence
  Synthetically generated peptide
GCEFCANPACTGCY

SEQ ID NO: 2399 - protein, 14 aa, Artificial Sequence
  Synthetically generated peptide
GCEPCANPACTGCY

SEQ ID NO: 2400 - protein, 14 aa, Artificial Sequence
  Synthetically generated peptide
GCESCANPACTGCY

SEQ ID NO: 2401 - protein, 14 aa, Artificial Sequence
  Synthetically generated peptide
GCETCANPACTGCY

SEQ ID NO: 2402 - protein, 14 aa, Artificial Sequence
  Synthetically generated peptide
GCEWCANPACTGCY

SEQ ID NO: 2403 - protein, 14 aa, Artificial Sequence
  Synthetically generated peptide
GCEYCANPACTGCY

SEQ ID NO: 2404 - protein, 14 aa, Artificial Sequence
  Synthetically generated peptide
GCEVCANPACTGCY

SEQ ID NO: 2405 - protein, 13 aa, Artificial Sequence
  Synthetically generated peptide
CCEAACNPACTGA

SEQ ID NO: 2406 - protein, 13 aa, Artificial Sequence
  Synthetically generated peptide
CCERACNPACTGA

SEQ ID NO: 2407 - protein, 13 aa, Artificial Sequence
  Synthetically generated peptide
CCENACNPACTGA

SEQ ID NO: 2408 - protein, 13 aa, Artificial Sequence
  Synthetically generated peptide
CCEDACNPACTGA

SEQ ID NO: 2409 - protein, 13 aa, Artificial Sequence
  Synthetically generated peptide
CCECACNPACTGA

SEQ ID NO: 2410 - protein, 13 aa, Artificial Sequence
  Synthetically generated peptide
CCEQACNPACTGA

SEQ ID NO: 2411 - protein, 13 aa, Artificial Sequence
  Synthetically generated peptide
CCEEACNPACTGA

SEQ ID NO: 2412 - protein, 13 aa, Artificial Sequence
  Synthetically generated peptide
CCEGACNPACTGA

SEQ ID NO: 2413 - protein, 13 aa, Artificial Sequence
  Synthetically generated peptide
CCEHACNPACTGA

SEQ ID NO: 2414 - protein, 13 aa, Artificial Sequence
  Synthetically generated peptide
CCEIACNPACTGA

SEQ ID NO: 2415 - protein, 13 aa, Artificial Sequence
  Synthetically generated peptide
CCEKACNPACTGA

SEQ ID NO: 2416 - protein, 13 aa, Artificial Sequence
  Synthetically generated peptide
CCEMACNPACTGA

SEQ ID NO: 2417 - protein, 13 aa, Artificial Sequence
  Synthetically generated peptide
CCEFACNPACTGA

SEQ ID NO: 2418 - protein, 13 aa, Artificial Sequence
  Synthetically generated peptide
CCEPACNPACTGA

SEQ ID NO: 2419 - protein, 13 aa, Artificial Sequence
  Synthetically generated peptide
CCESACNPACTGA

SEQ ID NO: 2420 - protein, 13 aa, Artificial Sequence
  Synthetically generated peptide
CCETACNPACTGA

SEQ ID NO: 2421 - protein, 13 aa, Artificial Sequence
  Synthetically generated peptide
CCEWACNPACTGA

SEQ ID NO: 2422 - protein, 13 aa, Artificial Sequence
  Synthetically generated peptide
CCEYACNPACTGA

SEQ ID NO: 2423 - protein, 13 aa, Artificial Sequence
  Synthetically generated peptide
CCEVACNPACTGA

SEQ ID NO: 2424 - protein, 14 aa, Artificial Sequence
  Synthetically generated peptide
CCELACNPACTGAY

SEQ ID NO: 2425 - protein, 14 aa, Artificial Sequence
  Synthetically generated peptide
CCEAACNPACTGAY

SEQ ID NO: 2426 - protein, 14 aa, Artificial Sequence
  Synthetically generated peptide
CCERACNPACTGAY

SEQ ID NO: 2427 - protein, 14 aa, Artificial Sequence
  Synthetically generated peptide
CCENACNPACTGAY

SEQ ID NO: 2428 - protein, 14 aa, Artificial Sequence
  Synthetically generated peptide
CCEDACNPACTGAY

SEQ ID NO: 2429 - protein, 14 aa, Artificial Sequence
  Synthetically generated peptide
CCECACNPACTGAY

SEQ ID NO: 2430 - protein, 14 aa, Artificial Sequence
  Synthetically generated peptide
CCEQACNPACTGAY

SEQ ID NO: 2431 - protein, 14 aa, Artificial Sequence
  Synthetically generated peptide
CCEEACNPACTGAY

SEQ ID NO: 2432 - protein, 14 aa, Artificial Sequence
  Synthetically generated peptide
CCEGACNPACTGAY

SEQ ID NO: 2433 - protein, 14 aa, Artificial Sequence
  Synthetically generated peptide
CCEHACNPACTGAY

SEQ ID NO: 2434 - protein, 14 aa, Artificial Sequence
  Synthetically generated peptide
CCEIACNPACTGAY

SEQ ID NO: 2435 - protein, 14 aa, Artificial Sequence
  Synthetically generated peptide
CCEKACNPACTGAY

SEQ ID NO: 2436 - protein, 14 aa, Artificial Sequence
  Synthetically generated peptide
CCEMACNPACTGAY

SEQ ID NO: 2437 - protein, 14 aa, Artificial Sequence
  Synthetically generated peptide
CCEFACNPACTGAY

SEQ ID NO: 2438 - protein, 14 aa, Artificial Sequence
  Synthetically generated peptide
CCEPACNPACTGAY

SEQ ID NO: 2439 - protein, 14 aa, Artificial Sequence
  Synthetically generated peptide
CCESACNPACTGAY

SEQ ID NO: 2440 - protein, 14 aa, Artificial Sequence
  Synthetically generated peptide
CCETACNPACTGAY

SEQ ID NO: 2441 - protein, 14 aa, Artificial Sequence
  Synthetically generated peptide
CCEWACNPACTGAY

SEQ ID NO: 2442 - protein, 14 aa, Artificial Sequence
  Synthetically generated peptide
CCEYACNPACTGAY

SEQ ID NO: 2443 - protein, 14 aa, Artificial Sequence
  Synthetically generated peptide
CCEVACNPACTGAY

SEQ ID NO: 2444 - protein, 13 aa, Artificial Sequence
  Synthetically generated peptide
CCELACNPACTGC

SEQ ID NO: 2445 - protein, 13 aa, Artificial Sequence
  Synthetically generated peptide
CCEAACNPACTGC

SEQ ID NO: 2446 - protein, 13 aa, Artificial Sequence
  Synthetically generated peptide
CCERACNPACTGC

SEQ ID NO: 2447 - protein, 13 aa, Artificial Sequence
  Synthetically generated peptide
CCENACNPACTGC

SEQ ID NO: 2448 - protein, 13 aa, Artificial Sequence
  Synthetically generated peptide
CCEDACNPACTGC

SEQ ID NO: 2449 - protein, 13 aa, Artificial Sequence
  Synthetically generated peptide
CCECACNPACTGC

SEQ ID NO: 2450 - protein, 13 aa, Artificial Sequence
  Synthetically generated peptide
CCEQACNPACTGC

SEQ ID NO: 2451 - protein, 13 aa, Artificial Sequence
  Synthetically generated peptide
CCEEACNPACTGC

SEQ ID NO: 2452 - protein, 13 aa, Artificial Sequence
  Synthetically generated peptide
CCEGACNPACTGC

SEQ ID NO: 2453 - protein, 13 aa, Artificial Sequence
  Synthetically generated peptide
CCEHACNPACTGC

SEQ ID NO: 2454 - protein, 13 aa, Artificial Sequence
  Synthetically generated peptide
CCEIACNPACTGC

SEQ ID NO: 2455 - protein, 13 aa, Artificial Sequence
  Synthetically generated peptide
CCEKACNPACTGC

SEQ ID NO: 2456 - protein, 13 aa, Artificial Sequence
  Synthetically generated peptide
CCEMACNPACTGC

SEQ ID NO: 2457 - protein, 13 aa, Artificial Sequence
  Synthetically generated peptide
CCEFACNPACTGC

SEQ ID NO: 2458 - protein, 13 aa, Artificial Sequence
  Synthetically generated peptide
CCEPACNPACTGC

SEQ ID NO: 2459 - protein, 13 aa, Artificial Sequence
  Synthetically generated peptide
CCESACNPACTGC

SEQ ID NO: 2460 - protein, 13 aa, Artificial Sequence
  Synthetically generated peptide
CCETACNPACTGC

SEQ ID NO: 2461 - protein, 13 aa, Artificial Sequence
  Synthetically generated peptide
CCEWACNPACTGC

SEQ ID NO: 2462 - protein, 13 aa, Artificial Sequence
  Synthetically generated peptide
CCEYACNPACTGC

SEQ ID NO: 2463 - protein, 13 aa, Artificial Sequence
  Synthetically generated peptide
CCEVACNPACTGC

SEQ ID NO: 2464 - protein, 14 aa, Artificial Sequence
  Synthetically generated peptide
CCELACNPACTGCY

SEQ ID NO: 2465 - protein, 14 aa, Artificial Sequence
  Synthetically generated peptide
CCEAACNPACTGCY

SEQ ID NO: 2466 - protein, 14 aa, Artificial Sequence
  Synthetically generated peptide
CCERACNPACTGCY

SEQ ID NO: 2467 - protein, 14 aa, Artificial Sequence
  Synthetically generated peptide
CCENACNPACTGCY

SEQ ID NO: 2468 - protein, 14 aa, Artificial Sequence
  Synthetically generated peptide
CCEDACNPACTGCY

SEQ ID NO: 2469 - protein, 14 aa, Artificial Sequence
  Synthetically generated peptide
CCECACNPACTGCY

SEQ ID NO: 2470 - protein, 14 aa, Artificial Sequence
  Synthetically generated peptide
CCEQACNPACTGCY

SEQ ID NO: 2471 - protein, 14 aa, Artificial Sequence
  Synthetically generated peptide
CCEEACNPACTGCY

SEQ ID NO: 2472 - protein, 14 aa, Artificial Sequence
  Synthetically generated peptide
CCEGACNPACTGCY

SEQ ID NO: 2473 - protein, 14 aa, Artificial Sequence
  Synthetically generated peptide
CCEHACNPACTGCY

SEQ ID NO: 2474 - protein, 14 aa, Artificial Sequence
  Synthetically generated peptide
CCEIACNPACTGCY

SEQ ID NO: 2475 - protein, 14 aa, Artificial Sequence
  Synthetically generated peptide
CCEKACNPACTGCY

SEQ ID NO: 2476 - protein, 14 aa, Artificial Sequence
  Synthetically generated peptide
CCEMACNPACTGCY

SEQ ID NO: 2477 - protein, 14 aa, Artificial Sequence
  Synthetically generated peptide
CCEFACNPACTGCY

SEQ ID NO: 2478 - protein, 14 aa, Artificial Sequence
  Synthetically generated peptide
CCEPACNPACTGCY

SEQ ID NO: 2479 - protein, 14 aa, Artificial Sequence
  Synthetically generated peptide
CCESACNPACTGCY

SEQ ID NO: 2480 - protein, 14 aa, Artificial Sequence
  Synthetically generated peptide
CCETACNPACTGCY

SEQ ID NO: 2481 - protein, 14 aa, Artificial Sequence
  Synthetically generated peptide
CCEWACNPACTGCY

SEQ ID NO: 2482 - protein, 14 aa, Artificial Sequence
  Synthetically generated peptide
CCEYACNPACTGCY

SEQ ID NO: 2483 - protein, 13 aa, Artificial Sequence
  Synthetically generated peptide
CCELCCNPACTGA

SEQ ID NO: 2484 - protein, 13 aa, Artificial Sequence
  Synthetically generated peptide
CCEACCNPACTGA

SEQ ID NO: 2485 - protein, 13 aa, Artificial Sequence
  Synthetically generated peptide
CCERCCNPACTGA

SEQ ID NO: 2486 - protein, 13 aa, Artificial Sequence
  Synthetically generated peptide
CCENCCNPACTGA

SEQ ID NO: 2487 - protein, 13 aa, Artificial Sequence
  Synthetically generated peptide
CCEDCCNPACTGA

SEQ ID NO: 2488 - protein, 13 aa, Artificial Sequence
  Synthetically generated peptide
CCECCCNPACTGA

SEQ ID NO: 2489 - protein, 13 aa, Artificial Sequence
  Synthetically generated peptide
CCEQCCNPACTGA

SEQ ID NO: 2490 - protein, 13 aa, Artificial Sequence
  Synthetically generated peptide
CCEECCNPACTGA

SEQ ID NO: 2491 - protein, 13 aa, Artificial Sequence
  Synthetically generated peptide
CCEGCCNPACTGA

SEQ ID NO: 2492 - protein, 13 aa, Artificial Sequence
  Synthetically generated peptide
CCEHCCNPACTGA

SEQ ID NO: 2493 - protein, 13 aa, Artificial Sequence
  Synthetically generated peptide
CCEICCNPACTGA

SEQ ID NO: 2494 - protein, 13 aa, Artificial Sequence
  Synthetically generated peptide
CCEKCCNPACTGA

SEQ ID NO: 2495 - protein, 13 aa, Artificial Sequence
  Synthetically generated peptide
CCEMCCNPACTGA

SEQ ID NO: 2496 - protein, 13 aa, Artificial Sequence
  Synthetically generated peptide
CCEFCCNPACTGA

SEQ ID NO: 2497 - protein, 13 aa, Artificial Sequence
  Synthetically generated peptide
CCEPCCNPACTGA

SEQ ID NO: 2498 - protein, 13 aa, Artificial Sequence
  Synthetically generated peptide
CCESCCNPACTGA

SEQ ID NO: 2499 - protein, 13 aa, Artificial Sequence
  Synthetically generated peptide
CCETCCNPACTGA

SEQ ID NO: 2500 - protein, 13 aa, Artificial Sequence
  Synthetically generated peptide
CCEWCCNPACTGA

SEQ ID NO: 2501 - protein, 13 aa, Artificial Sequence
  Synthetically generated peptide
CCEYCCNPACTGA

SEQ ID NO: 2502 - protein, 13 aa, Artificial Sequence
  Synthetically generated peptide
CCEVCCNPACTGA

SEQ ID NO: 2503 - protein, 14 aa, Artificial Sequence
  Synthetically generated peptide
CCELCCNPACTGAY

SEQ ID NO: 2504 - protein, 14 aa, Artificial Sequence
  Synthetically generated peptide
CCEACCNPACTGAY

SEQ ID NO: 2505 - protein, 14 aa, Artificial Sequence
  Synthetically generated peptide
CCERCCNPACTGAY

SEQ ID NO: 2506 - protein, 14 aa, Artificial Sequence
  Synthetically generated peptide
CCENCCNPACTGAY

SEQ ID NO: 2507 - protein, 14 aa, Artificial Sequence
  Synthetically generated peptide
CCEDCCNPACTGAY

SEQ ID NO: 2508 - protein, 14 aa, Artificial Sequence
  Synthetically generated peptide
CCECCCNPACTGAY

SEQ ID NO: 2509 - protein, 14 aa, Artificial Sequence
  Synthetically generated peptide
CCEQCCNPACTGAY

SEQ ID NO: 2510 - protein, 14 aa, Artificial Sequence
  Synthetically generated peptide
CCEECCNPACTGAY

SEQ ID NO: 2511 - protein, 14 aa, Artificial Sequence
  Synthetically generated peptide
CCEGCCNPACTGAY

SEQ ID NO: 2512 - protein, 14 aa, Artificial Sequence
  Synthetically generated peptide
CCEHCCNPACTGAY

SEQ ID NO: 2513 - protein, 14 aa, Artificial Sequence
  Synthetically generated peptide
CCEICCNPACTGAY

SEQ ID NO: 2514 - protein, 14 aa, Artificial Sequence
  Synthetically generated peptide
CCEKCCNPACTGAY

SEQ ID NO: 2515 - protein, 14 aa, Artificial Sequence
  Synthetically generated peptide
CCEMCCNPACTGAY

SEQ ID NO: 2516 - protein, 14 aa, Artificial Sequence
  Synthetically generated peptide
CCEFCCNPACTGAY

SEQ ID NO: 2517 - protein, 14 aa, Artificial Sequence
  Synthetically generated peptide
CCEPCCNPACTGAY

SEQ ID NO: 2518 - protein, 14 aa, Artificial Sequence
  Synthetically generated peptide
CCESCCNPACTGAY

SEQ ID NO: 2519 - protein, 14 aa, Artificial Sequence
  Synthetically generated peptide
CCETCCNPACTGAY

SEQ ID NO: 2520 - protein, 14 aa, Artificial Sequence
  Synthetically generated peptide
CCEWCCNPACTGAY

SEQ ID NO: 2521 - protein, 14 aa, Artificial Sequence
  Synthetically generated peptide
CCEYCCNPACTGAY

SEQ ID NO: 2522 - protein, 14 aa, Artificial Sequence
  Synthetically generated peptide
CCEVCCNPACTGAY

SEQ ID NO: 2523 - protein, 13 aa, Artificial Sequence
  Synthetically generated peptide
CCELGCNPACTGG

SEQ ID NO: 2524 - protein, 13 aa, Artificial Sequence
  Synthetically generated peptide
CCEAGCNPACTGG

SEQ ID NO: 2525 - protein, 13 aa, Artificial Sequence
  Synthetically generated peptide
CCERGCNPACTGG

SEQ ID NO: 2526 - protein, 13 aa, Artificial Sequence
  Synthetically generated peptide
CCENGCNPACTGG

SEQ ID NO: 2527 - protein, 13 aa, Artificial Sequence
  Synthetically generated peptide
CCEDGCNPACTGG

SEQ ID NO: 2528 - protein, 13 aa, Artificial Sequence
  Synthetically generated peptide
CCECGCNPACTGG

SEQ ID NO: 2529 - protein, 13 aa, Artificial Sequence
  Synthetically generated peptide
CCEQGCNPACTGG

SEQ ID NO: 2530 - protein, 13 aa, Artificial Sequence
  Synthetically generated peptide
CCEEGCNPACTGG

SEQ ID NO: 2531 - protein, 13 aa, Artificial Sequence
  Synthetically generated peptide
CCEGGCNPACTGG

SEQ ID NO: 2532 - protein, 13 aa, Artificial Sequence
  Synthetically generated peptide
CCEHGCNPACTGG

SEQ ID NO: 2533 - protein, 13 aa, Artificial Sequence
  Synthetically generated peptide
CCEIGCNPACTGG

SEQ ID NO: 2534 - protein, 13 aa, Artificial Sequence
  Synthetically generated peptide
CCEKGCNPACTGG

SEQ ID NO: 2535 - protein, 13 aa, Artificial Sequence
  Synthetically generated peptide
CCEMGCNPACTGG

SEQ ID NO: 2536 - protein, 13 aa, Artificial Sequence
  Synthetically generated peptide
CCEFGCNPACTGG

SEQ ID NO: 2537 - protein, 13 aa, Artificial Sequence
  Synthetically generated peptide
CCEPGCNPACTGG

SEQ ID NO: 2538 - protein, 13 aa, Artificial Sequence
  Synthetically generated peptide
CCESGCNPACTGG

SEQ ID NO: 2539 - protein, 13 aa, Artificial Sequence
  Synthetically generated peptide
CCETGCNPACTGG

SEQ ID NO: 2540 - protein, 13 aa, Artificial Sequence
  Synthetically generated peptide
CCEWGCNPACTGG

SEQ ID NO: 2541 - protein, 13 aa, Artificial Sequence
  Synthetically generated peptide
CCEYGCNPACTGG

SEQ ID NO: 2542 - protein, 13 aa, Artificial Sequence
  Synthetically generated peptide
CCEVGCNPACTGG

SEQ ID NO: 2543 - protein, 14 aa, Artificial Sequence
  Synthetically generated peptide
CCELGCNPACTGGY

SEQ ID NO: 2544 - protein, 14 aa, Artificial Sequence
  Synthetically generated peptide
CCEAGCNPACTGGY

SEQ ID NO: 2545 - protein, 14 aa, Artificial Sequence
  Synthetically generated peptide
CCERGCNPACTGGY

SEQ ID NO: 2546 - protein, 14 aa, Artificial Sequence
  Synthetically generated peptide
CCENGCNPACTGGY

SEQ ID NO: 2547 - protein, 14 aa, Artificial Sequence
  Synthetically generated peptide
CCEDGCNPACTGGY

SEQ ID NO: 2548 - protein, 14 aa, Artificial Sequence
  Synthetically generated peptide
CCECGCNPACTGGY

SEQ ID NO: 2549 - protein, 14 aa, Artificial Sequence
  Synthetically generated peptide
CCEQGCNPACTGGY

SEQ ID NO: 2550 - protein, 14 aa, Artificial Sequence
  Synthetically generated peptide
CCEEGCNPACTGGY

SEQ ID NO: 2551 - protein, 14 aa, Artificial Sequence
  Synthetically generated peptide
CCEGGCNPACTGGY

SEQ ID NO: 2552 - protein, 14 aa, Artificial Sequence
  Synthetically generated peptide
CCEHGCNPACTGGY

SEQ ID NO: 2553 - protein, 14 aa, Artificial Sequence
  Synthetically generated peptide
CCEIGCNPACTGGY

SEQ ID NO: 2554 - protein, 14 aa, Artificial Sequence
  Synthetically generated peptide
CCEKGCNPACTGGY

SEQ ID NO: 2555 - protein, 14 aa, Artificial Sequence
  Synthetically generated peptide
CCEMGCNPACTGGY

SEQ ID NO: 2556 - protein, 14 aa, Artificial Sequence
  Synthetically generated peptide
CCEFGCNPACTGGY

SEQ ID NO: 2557 - protein, 14 aa, Artificial Sequence
  Synthetically generated peptide
CCEPGCNPACTGGY

SEQ ID NO: 2558 - protein, 14 aa, Artificial Sequence
  Synthetically generated peptide
CCESGCNPACTGGY

SEQ ID NO: 2559 - protein, 14 aa, Artificial Sequence
  Synthetically generated peptide
CCETGCNPACTGGY

SEQ ID NO: 2560 - protein, 14 aa, Artificial Sequence
  Synthetically generated peptide
CCEWGCNPACTGGY

SEQ ID NO: 2561 - protein, 14 aa, Artificial Sequence
  Synthetically generated peptide
CCEYGCNPACTGGY

SEQ ID NO: 2562 - protein, 14 aa, Artificial Sequence
  Synthetically generated peptide
CCEVGCNPACTGGY

SEQ ID NO: 2563 - protein, 14 aa, Artificial Sequence
  Synthetically generated peptide
CCEVACNPACTGCY

SEQ ID NO: 2564 - protein, 13 aa, Artificial Sequence
  Synthetically generated peptide
CCELGCNPACTGC

SEQ ID NO: 2565 - protein, 13 aa, Artificial Sequence
  Synthetically generated peptide
CCEAGCNPACTGC

SEQ ID NO: 2566 - protein, 13 aa, Artificial Sequence
  Synthetically generated peptide
CCERGCNPACTGC

SEQ ID NO: 2567 - protein, 13 aa, Artificial Sequence
  Synthetically generated peptide
CCENGCNPACTGC

SEQ ID NO: 2568 - protein, 13 aa, Artificial Sequence
  Synthetically generated peptide
CCEDGCNPACTGC

SEQ ID NO: 2569 - protein, 13 aa, Artificial Sequence
  Synthetically generated peptide
CCECGCNPACTGC

SEQ ID NO: 2570 - protein, 13 aa, Artificial Sequence
  Synthetically generated peptide
CCEQGCNPACTGC

SEQ ID NO: 2571 - protein, 13 aa, Artificial Sequence
  Synthetically generated peptide
CCEEGCNPACTGC

SEQ ID NO: 2572 - protein, 13 aa, Artificial Sequence
  Synthetically generated peptide
CCEGGCNPACTGC

SEQ ID NO: 2573 - protein, 13 aa, Artificial Sequence
  Synthetically generated peptide
CCEHGCNPACTGC

SEQ ID NO: 2574 - protein, 13 aa, Artificial Sequence
  Synthetically generated peptide
CCEIGCNPACTGC

SEQ ID NO: 2575 - protein, 13 aa, Artificial Sequence
  Synthetically generated peptide
CCEKGCNPACTGC

SEQ ID NO: 2576 - protein, 13 aa, Artificial Sequence
  Synthetically generated peptide
CCEMGCNPACTGC

SEQ ID NO: 2577 - protein, 13 aa, Artificial Sequence
  Synthetically generated peptide
CCEFGCNPACTGC

SEQ ID NO: 2578 - protein, 13 aa, Artificial Sequence
  Synthetically generated peptide
CCEPGCNPACTGC

SEQ ID NO: 2579 - protein, 13 aa, Artificial Sequence
  Synthetically generated peptide
CCESGCNPACTGC

SEQ ID NO: 2580 - protein, 13 aa, Artificial Sequence
  Synthetically generated peptide
CCETGCNPACTGC

SEQ ID NO: 2581 - protein, 13 aa, Artificial Sequence
  Synthetically generated peptide
CCEWGCNPACTGC

SEQ ID NO: 2582 - protein, 13 aa, Artificial Sequence
  Synthetically generated peptide
CCEYGCNPACTGC

SEQ ID NO: 2583 - protein, 13 aa, Artificial Sequence
  Synthetically generated peptide
CCEVGCNPACTGC

SEQ ID NO: 2584 - protein, 14 aa, Artificial Sequence
  Synthetically generated peptide
CCELGCNPACTGCY

SEQ ID NO: 2585 - protein, 14 aa, Artificial Sequence
  Synthetically generated peptide
CCEAGCNPACTGCY

SEQ ID NO: 2586 - protein, 14 aa, Artificial Sequence
  Synthetically generated peptide
CCERGCNPACTGCY

SEQ ID NO: 2587 - protein, 14 aa, Artificial Sequence
  Synthetically generated peptide
CCENGCNPACTGCY

SEQ ID NO: 2588 - protein, 14 aa, Artificial Sequence
  Synthetically generated peptide
CCEDGCNPACTGCY

SEQ ID NO: 2589 - protein, 14 aa, Artificial Sequence
  Synthetically generated peptide
CCECGCNPACTGCY

SEQ ID NO: 2590 - protein, 14 aa, Artificial Sequence
  Synthetically generated peptide
CCEQGCNPACTGCY

SEQ ID NO: 2591 - protein, 14 aa, Artificial Sequence
  Synthetically generated peptide
CCEEGCNPACTGCY

SEQ ID NO: 2592 - protein, 14 aa, Artificial Sequence
  Synthetically generated peptide
CCEGGCNPACTGCY

SEQ ID NO: 2593 - protein, 14 aa, Artificial Sequence
  Synthetically generated peptide
CCEHGCNPACTGCY

SEQ ID NO: 2594 - protein, 14 aa, Artificial Sequence
  Synthetically generated peptide
CCEIGCNPACTGCY

SEQ ID NO: 2595 - protein, 14 aa, Artificial Sequence
  Synthetically generated peptide
CCEKGCNPACTGCY

SEQ ID NO: 2596 - protein, 14 aa, Artificial Sequence
  Synthetically generated peptide
CCEMGCNPACTGCY

SEQ ID NO: 2597 - protein, 14 aa, Artificial Sequence
  Synthetically generated peptide
CCEFGCNPACTGCY

SEQ ID NO: 2598 - protein, 14 aa, Artificial Sequence
  Synthetically generated peptide
CCEPGCNPACTGCY

SEQ ID NO: 2599 - protein, 14 aa, Artificial Sequence
  Synthetically generated peptide
CCESGCNPACTGCY

SEQ ID NO: 2600 - protein, 14 aa, Artificial Sequence
  Synthetically generated peptide
CCETGCNPACTGCY

SEQ ID NO: 2601 - protein, 14 aa, Artificial Sequence
  Synthetically generated peptide
CCEWGCNPACTGCY

SEQ ID NO: 2602 - protein, 14 aa, Artificial Sequence
  Synthetically generated peptide
CCEYGCNPACTGCY

SEQ ID NO: 2603 - protein, 14 aa, Artificial Sequence
  Synthetically generated peptide
CCEVGCNPACTGCY

SEQ ID NO: 2604 - protein, 13 aa, Artificial Sequence
  Synthetically generated peptide
CCELCCNPACTGG

SEQ ID NO: 2605 - protein, 13 aa, Artificial Sequence
  Synthetically generated peptide
CCEACCNPACTGG

SEQ ID NO: 2606 - protein, 13 aa, Artificial Sequence
  Synthetically generated peptide
CCERCCNPACTGG

SEQ ID NO: 2607 - protein, 13 aa, Artificial Sequence
  Synthetically generated peptide
CCENCCNPACTGG

SEQ ID NO: 2608 - protein, 13 aa, Artificial Sequence
  Synthetically generated peptide
CCEDCCNPACTGG

SEQ ID NO: 2609 - protein, 13 aa, Artificial Sequence
  Synthetically generated peptide
CCECCCNPACTGG

SEQ ID NO: 2610 - protein, 13 aa, Artificial Sequence
  Synthetically generated peptide
CCEQCCNPACTGG

SEQ ID NO: 2611 - protein, 13 aa, Artificial Sequence
  Synthetically generated peptide
CCEECCNPACTGG

SEQ ID NO: 2612 - protein, 13 aa, Artificial Sequence
  Synthetically generated peptide
CCEGCCNPACTGG

SEQ ID NO: 2613 - protein, 13 aa, Artificial Sequence
  Synthetically generated peptide
CCEHCCNPACTGG

SEQ ID NO: 2614 - protein, 13 aa, Artificial Sequence
  Synthetically generated peptide
CCEICCNPACTGG

SEQ ID NO: 2615 - protein, 13 aa, Artificial Sequence
  Synthetically generated peptide
CCEKCCNPACTGG

SEQ ID NO: 2616 - protein, 13 aa, Artificial Sequence
  Synthetically generated peptide
CCEMCCNPACTGG

SEQ ID NO: 2617 - protein, 13 aa, Artificial Sequence
  Synthetically generated peptide
CCEFCCNPACTGG

SEQ ID NO: 2618 - protein, 13 aa, Artificial Sequence
  Synthetically generated peptide
CCEPCCNPACTGG

SEQ ID NO: 2619 - protein, 13 aa, Artificial Sequence
  Synthetically generated peptide
CCESCCNPACTGG

SEQ ID NO: 2620 - protein, 13 aa, Artificial Sequence
  Synthetically generated peptide
CCETCCNPACTGG

SEQ ID NO: 2621 - protein, 13 aa, Artificial Sequence
  Synthetically generated peptide
CCEWCCNPACTGG

SEQ ID NO: 2622 - protein, 13 aa, Artificial Sequence
  Synthetically generated peptide
CCEYCCNPACTGG

SEQ ID NO: 2623 - protein, 13 aa, Artificial Sequence
  Synthetically generated peptide
CCEVCCNPACTGG

SEQ ID NO: 2624 - protein, 14 aa, Artificial Sequence
  Synthetically generated peptide
CCELCCNPACTGGY

SEQ ID NO: 2625 - protein, 14 aa, Artificial Sequence
  Synthetically generated peptide
CCEACCNPACTGGY

SEQ ID NO: 2626 - protein, 14 aa, Artificial Sequence
  Synthetically generated peptide
CCERCCNPACTGGY

SEQ ID NO: 2627 - protein, 14 aa, Artificial Sequence
  Synthetically generated peptide
CCENCCNPACTGGY

SEQ ID NO: 2628 - protein, 14 aa, Artificial Sequence
  Synthetically generated peptide
CCEDCCNPACTGGY

SEQ ID NO: 2629 - protein, 14 aa, Artificial Sequence
  Synthetically generated peptide
CCECCCNPACTGGY

SEQ ID NO: 2630 - protein, 14 aa, Artificial Sequence
  Synthetically generated peptide
CCEQCCNPACTGGY

SEQ ID NO: 2631 - protein, 14 aa, Artificial Sequence
  Synthetically generated peptide
CCEECCNPACTGGY

SEQ ID NO: 2632 - protein, 14 aa, Artificial Sequence
  Synthetically generated peptide
CCEGCCNPACTGGY

SEQ ID NO: 2633 - protein, 14 aa, Artificial Sequence
  Synthetically generated peptide
CCEHCCNPACTGGY

SEQ ID NO: 2634 - protein, 14 aa, Artificial Sequence
  Synthetically generated peptide
CCEICCNPACTGGY

SEQ ID NO: 2635 - protein, 14 aa, Artificial Sequence
  Synthetically generated peptide
CCEKCCNPACTGGY

SEQ ID NO: 2636 - protein, 14 aa, Artificial Sequence
  Synthetically generated peptide
CCEMCCNPACTGGY

SEQ ID NO: 2637 - protein, 14 aa, Artificial Sequence
  Synthetically generated peptide
CCEFCCNPACTGGY

SEQ ID NO: 2638 - protein, 14 aa, Artificial Sequence
  Synthetically generated peptide
CCEPCCNPACTGGY

SEQ ID NO: 2639 - protein, 14 aa, Artificial Sequence
  Synthetically generated peptide
CCESCCNPACTGGY

SEQ ID NO: 2640 - protein, 14 aa, Artificial Sequence
  Synthetically generated peptide
CCETCCNPACTGGY

SEQ ID NO: 2641 - protein, 14 aa, Artificial Sequence
  Synthetically generated peptide
CCEWCCNPACTGGY

SEQ ID NO: 2642 - protein, 14 aa, Artificial Sequence
  Synthetically generated peptide
CCEYCCNPACTGGY

SEQ ID NO: 2643 - protein, 14 aa, Artificial Sequence
  Synthetically generated peptide
CCEVCCNPACTGGY

SEQ ID NO: 2644 - protein, 13 aa, Artificial Sequence
  Synthetically generated peptide
CCELACNPACTGG

SEQ ID NO: 2645 - protein, 13 aa, Artificial Sequence
  Synthetically generated peptide
CCEAACNPACTGG

SEQ ID NO: 2646 - protein, 13 aa, Artificial Sequence
  Synthetically generated peptide
CCERACNPACTGG

SEQ ID NO: 2647 - protein, 13 aa, Artificial Sequence
  Synthetically generated peptide
CCENACNPACTGG

SEQ ID NO: 2648 - protein, 13 aa, Artificial Sequence
  Synthetically generated peptide
CCEDACNPACTGG

SEQ ID NO: 2649 - protein, 13 aa, Artificial Sequence
  Synthetically generated peptide
CCECACNPACTGG

SEQ ID NO: 2650 - protein, 13 aa, Artificial Sequence
  Synthetically generated peptide
CCEQACNPACTGG

SEQ ID NO: 2651 - protein, 13 aa, Artificial Sequence
  Synthetically generated peptide
CCEEACNPACTGG

SEQ ID NO: 2652 - protein, 13 aa, Artificial Sequence
  Synthetically generated peptide
CCEGACNPACTGG

SEQ ID NO: 2653 - protein, 13 aa, Artificial Sequence
  Synthetically generated peptide
CCEHACNPACTGG

SEQ ID NO: 2654 - protein, 13 aa, Artificial Sequence
  Synthetically generated peptide
CCEIACNPACTGG

SEQ ID NO: 2655 - protein, 13 aa, Artificial Sequence
  Synthetically generated peptide
CCEKACNPACTGG

SEQ ID NO: 2656 - protein, 13 aa, Artificial Sequence
  Synthetically generated peptide
CCEMACNPACTGG

SEQ ID NO: 2657 - protein, 13 aa, Artificial Sequence
  Synthetically generated peptide
CCEFACNPACTGG

SEQ ID NO: 2658 - protein, 13 aa, Artificial Sequence
  Synthetically generated peptide
CCEPACNPACTGG

SEQ ID NO: 2659 - protein, 13 aa, Artificial Sequence
  Synthetically generated peptide
CCESACNPACTGG

SEQ ID NO: 2660 - protein, 13 aa, Artificial Sequence
  Synthetically generated peptide
CCETACNPACTGG

SEQ ID NO: 2661 - protein, 13 aa, Artificial Sequence
  Synthetically generated peptide
CCEWACNPACTGG

SEQ ID NO: 2662 - protein, 13 aa, Artificial Sequence
  Synthetically generated peptide
CCEYACNPACTGG

SEQ ID NO: 2663 - protein, 13 aa, Artificial Sequence
  Synthetically generated peptide
CCEVACNPACTGG

SEQ ID NO: 2664 - protein, 14 aa, Artificial Sequence
  Synthetically generated peptide
CCELACNPACTGGY

SEQ ID NO: 2665 - protein, 14 aa, Artificial Sequence
  Synthetically generated peptide
CCEAACNPACTGGY

SEQ ID NO: 2666 - protein, 14 aa, Artificial Sequence
  Synthetically generated peptide
CCERACNPACTGGY

SEQ ID NO: 2667 - protein, 14 aa, Artificial Sequence
  Synthetically generated peptide
CCENACNPACTGGY

SEQ ID NO: 2668 - protein, 14 aa, Artificial Sequence
  Synthetically generated peptide
CCEDACNPACTGGY

SEQ ID NO: 2669 - protein, 14 aa, Artificial Sequence
  Synthetically generated peptide
CCECACNPACTGGY

SEQ ID NO: 2670 - protein, 14 aa, Artificial Sequence
  Synthetically generated peptide
CCEQACNPACTGGY

SEQ ID NO: 2671 - protein, 14 aa, Artificial Sequence
  Synthetically generated peptide
CCEEACNPACTGGY

SEQ ID NO: 2672 - protein, 14 aa, Artificial Sequence
  Synthetically generated peptide
CCEGACNPACTGGY

SEQ ID NO: 2673 - protein, 14 aa, Artificial Sequence
  Synthetically generated peptide
CCEHACNPACTGGY

SEQ ID NO: 2674 - protein, 14 aa, Artificial Sequence
  Synthetically generated peptide
CCEIACNPACTGGY

SEQ ID NO: 2675 - protein, 14 aa, Artificial Sequence
  Synthetically generated peptide
CCEKACNPACTGGY

SEQ ID NO: 2676 - protein, 14 aa, Artificial Sequence
  Synthetically generated peptide
CCEMACNPACTGGY

SEQ ID NO: 2677 - protein, 14 aa, Artificial Sequence
  Synthetically generated peptide
CCEFACNPACTGGY

SEQ ID NO: 2678 - protein, 14 aa, Artificial Sequence
  Synthetically generated peptide
CCEPACNPACTGGY

SEQ ID NO: 2679 - protein, 14 aa, Artificial Sequence
  Synthetically generated peptide
CCESACNPACTGGY

SEQ ID NO: 2680 - protein, 14 aa, Artificial Sequence
  Synthetically generated peptide
CCETACNPACTGGY

SEQ ID NO: 2681 - protein, 14 aa, Artificial Sequence
  Synthetically generated peptide
CCEWACNPACTGGY

SEQ ID NO: 2682 - protein, 14 aa, Artificial Sequence
  Synthetically generated peptide
CCEYACNPACTGGY

SEQ ID NO: 2683 - protein, 14 aa, Artificial Sequence
  Synthetically generated peptide
CCEVACNPACTGGY

SEQ ID NO: 2684 - protein, 13 aa, Artificial Sequence
  Synthetically generated peptide
CCELGCNPACTGA

SEQ ID NO: 2685 - protein, 13 aa, Artificial Sequence
  Synthetically generated peptide
CCEAGCNPACTGA

SEQ ID NO: 2686 - protein, 13 aa, Artificial Sequence
  Synthetically generated peptide
CCERGCNPACTGA

SEQ ID NO: 2687 - protein, 13 aa, Artificial Sequence
  Synthetically generated peptide
CCENGCNPACTGA

SEQ ID NO: 2688 - protein, 13 aa, Artificial Sequence
  Synthetically generated peptide
CCEDGCNPACTGA

SEQ ID NO: 2689 - protein, 13 aa, Artificial Sequence
  Synthetically generated peptide
CCECGCNPACTGA

SEQ ID NO: 2690 - protein, 13 aa, Artificial Sequence
  Synthetically generated peptide
CCEQGCNPACTGA

SEQ ID NO: 2691 - protein, 13 aa, Artificial Sequence
  Synthetically generated peptide
CCEEGCNPACTGA

SEQ ID NO: 2692 - protein, 13 aa, Artificial Sequence
  Synthetically generated peptide
CCEGGCNPACTGA

SEQ ID NO: 2693 - protein, 13 aa, Artificial Sequence
  Synthetically generated peptide
CCEHGCNPACTGA

SEQ ID NO: 2694 - protein, 13 aa, Artificial Sequence
  Synthetically generated peptide
CCEIGCNPACTGA

SEQ ID NO: 2695 - protein, 13 aa, Artificial Sequence
  Synthetically generated peptide
CCEKGCNPACTGA

SEQ ID NO: 2696 - protein, 13 aa, Artificial Sequence
  Synthetically generated peptide
CCEMGCNPACTGA

SEQ ID NO: 2697 - protein, 13 aa, Artificial Sequence
  Synthetically generated peptide
CCEFGCNPACTGA

SEQ ID NO: 2698 - protein, 13 aa, Artificial Sequence
  Synthetically generated peptide
CCEPGCNPACTGA

SEQ ID NO: 2699 - protein, 13 aa, Artificial Sequence
  Synthetically generated peptide
CCESGCNPACTGA

SEQ ID NO: 2700 - protein, 13 aa, Artificial Sequence
  Synthetically generated peptide
CCETGCNPACTGA

SEQ ID NO: 2701 - protein, 13 aa, Artificial Sequence
  Synthetically generated peptide
CCEWGCNPACTGA

SEQ ID NO: 2702 - protein, 13 aa, Artificial Sequence
  Synthetically generated peptide
CCEYGCNPACTGA

SEQ ID NO: 2703 - protein, 13 aa, Artificial Sequence
  Synthetically generated peptide
CCEVGCNPACTGA

SEQ ID NO: 2704 - protein, 14 aa, Artificial Sequence
  Synthetically generated peptide
CCELACNPACTGAY

SEQ ID NO: 2705 - protein, 14 aa, Artificial Sequence
  Synthetically generated peptide
CCEAACNPACTGAY

SEQ ID NO: 2706 - protein, 14 aa, Artificial Sequence
  Synthetically generated peptide
CCERACNPACTGAY

SEQ ID NO: 2707 - protein, 14 aa, Artificial Sequence
  Synthetically generated peptide
CCENACNPACTGAY

SEQ ID NO: 2708 - protein, 14 aa, Artificial Sequence
  Synthetically generated peptide
CCEDACNPACTGAY

SEQ ID NO: 2709 - protein, 14 aa, Artificial Sequence
  Synthetically generated peptide
CCECACNPACTGAY

SEQ ID NO: 2710 - protein, 14 aa, Artificial Sequence
  Synthetically generated peptide
CCEQACNPACTGAY

SEQ ID NO: 2711 - protein, 14 aa, Artificial Sequence
  Synthetically generated peptide
CCEEACNPACTGAY

SEQ ID NO: 2712 - protein, 14 aa, Artificial Sequence
  Synthetically generated peptide
CCEGACNPACTGAY

SEQ ID NO: 2713 - protein, 14 aa, Artificial Sequence
  Synthetically generated peptide
CCEHACNPACTGAY

SEQ ID NO: 2714 - protein, 14 aa, Artificial Sequence
  Synthetically generated peptide
CCEIACNPACTGAY

SEQ ID NO: 2715 - protein, 14 aa, Artificial Sequence
  Synthetically generated peptide
CCEKACNPACTGAY

SEQ ID NO: 2716 - protein, 14 aa, Artificial Sequence
  Synthetically generated peptide
CCEMACNPACTGAY

SEQ ID NO: 2717 - protein, 14 aa, Artificial Sequence
  Synthetically generated peptide
CCEFACNPACTGAY

SEQ ID NO: 2718 - protein, 14 aa, Artificial Sequence
  Synthetically generated peptide
CCEPACNPACTGAY

SEQ ID NO: 2719 - protein, 14 aa, Artificial Sequence
  Synthetically generated peptide
CCESACNPACTGAY

SEQ ID NO: 2720 - protein, 14 aa, Artificial Sequence
  Synthetically generated peptide
CCETACNPACTGAY

SEQ ID NO: 2721 - protein, 14 aa, Artificial Sequence
  Synthetically generated peptide
CCEWACNPACTGAY

SEQ ID NO: 2722 - protein, 14 aa, Artificial Sequence
  Synthetically generated peptide
CCEYACNPACTGAY

SEQ ID NO: 2723 - protein, 14 aa, Artificial Sequence
  Synthetically generated peptide
CCEVACNPACTGAY

SEQ ID NO: 2724 - protein, 12 aa, Artificial Sequence
  Synthetically generated peptide
CCLCCNPACTGC

SEQ ID NO: 2725 - protein, 11 aa, Artificial Sequence
  Synthetically generated peptide
CCCCNPACTGC

SEQ ID NO: 2726 - protein, 11 aa, Artificial Sequence
  Synthetically generated peptide
CCLCCPACTGC

SEQ ID NO: 2727 - protein, 11 aa, Artificial Sequence
  Synthetically generated peptide
CCLCCNACTGC

SEQ ID NO: 2728 - protein, 11 aa, Artificial Sequence
  Synthetically generated peptide
CCLCCNPCTGC

SEQ ID NO: 2729 - protein, 11 aa, Artificial Sequence
  Synthetically generated peptide
CCLCCNPACGC

SEQ ID NO: 2730 - protein, 11 aa, Artificial Sequence
  Synthetically generated peptide
CCLCCNPACTC

SEQ ID NO: 2731 - protein, 12 aa, Artificial Sequence
  Synthetically generated peptide
CCECCNPACTGC

SEQ ID NO: 2732 - protein, 11 aa, Artificial Sequence
  Synthetically generated peptide
CCECCPACTGC

SEQ ID NO: 2733 - protein, 11 aa, Artificial Sequence
  Synthetically generated peptide
CCECCNACTGC

SEQ ID NO: 2734 - protein, 11 aa, Artificial Sequence
  Synthetically generated peptide
CCECCNPCTGC

SEQ ID NO: 2735 - protein, 11 aa, Artificial Sequence
  Synthetically generated peptide
CCECCNPACGC

SEQ ID NO: 2736 - protein, 11 aa, Artificial Sequence
  Synthetically generated peptide
CCECCNPACTC

SEQ ID NO: 2737 - protein, 12 aa, Artificial Sequence
  Synthetically generated peptide
CCELCCPACTGC

SEQ ID NO: 2738 - protein, 11 aa, Artificial Sequence
  Synthetically generated peptide
CCELCCACTGC

SEQ ID NO: 2739 - protein, 11 aa, Artificial Sequence
  Synthetically generated peptide
CCELCCPCTGC

SEQ ID NO: 2740 - protein, 11 aa, Artificial Sequence
  Synthetically generated peptide
CCELCCPACGC

SEQ ID NO: 2741 - protein, 11 aa, Artificial Sequence
  Synthetically generated peptide
CCELCCPACTC

SEQ ID NO: 2742 - protein, 12 aa, Artificial Sequence
  Synthetically generated peptide
CCELCCNACTGC

SEQ ID NO: 2743 - protein, 11 aa, Artificial Sequence
  Synthetically generated peptide
CCELCCNCTGC

SEQ ID NO: 2744 - protein, 11 aa, Artificial Sequence
  Synthetically generated peptide
CCELCCNACGC

SEQ ID NO: 2745 - protein, 11 aa, Artificial Sequence
  Synthetically generated peptide
CCELCCNACTC

SEQ ID NO: 2746 - protein, 12 aa, Artificial Sequence
  Synthetically generated peptide
CCELCCNPCTGC

SEQ ID NO: 2747 - protein, 11 aa, Artificial Sequence
  Synthetically generated peptide
CCELCCNPCGC

SEQ ID NO: 2748 - protein, 11 aa, Artificial Sequence
  Synthetically generated peptide
CCELCCNPCTC

SEQ ID NO: 2749 - protein, 12 aa, Artificial Sequence
  Synthetically generated peptide
CCELCCNPACGC

SEQ ID NO: 2750 - protein, 11 aa, Artificial Sequence
  Synthetically generated peptide
CCELCCNPACC

SEQ ID NO: 2751 - protein, 12 aa, Artificial Sequence
  Synthetically generated peptide
CCELCCNPACTC

SEQ ID NO: 2752 - protein, 12 aa, Artificial Sequence
  Synthetically generated peptide
CCWCCNPACTGC

SEQ ID NO: 2753 - protein, 11 aa, Artificial Sequence
  Synthetically generated peptide
CCCCNPACTGC

SEQ ID NO: 2754 - protein, 11 aa, Artificial Sequence
  Synthetically generated peptide
CCWCCPACTGC

SEQ ID NO: 2755 - protein, 11 aa, Artificial Sequence
  Synthetically generated peptide
CCWCCNACTGC

SEQ ID NO: 2756 - protein, 11 aa, Artificial Sequence
  Synthetically generated peptide
CCWCCNPCTGC

SEQ ID NO: 2757 - protein, 11 aa, Artificial Sequence
  Synthetically generated peptide
CCWCCNPACGC

SEQ ID NO: 2758 - protein, 11 aa, Artificial Sequence
  Synthetically generated peptide
CCWCCNPACTC

SEQ ID NO: 2759 - protein, 12 aa, Artificial Sequence
  Synthetically generated peptide
CCECCNPACTGC

SEQ ID NO: 2760 - protein, 11 aa, Artificial Sequence
  Synthetically generated peptide
CCECCPACTGC

SEQ ID NO: 2761 - protein, 11 aa, Artificial Sequence
  Synthetically generated peptide
CCECCNACTGC

SEQ ID NO: 2762 - protein, 11 aa, Artificial Sequence
  Synthetically generated peptide
CCECCNPCTGC

SEQ ID NO: 2763 - protein, 11 aa, Artificial Sequence
  Synthetically generated peptide
CCECCNPACGC

SEQ ID NO: 2764 - protein, 11 aa, Artificial Sequence
  Synthetically generated peptide
CCECCNPACTC

SEQ ID NO: 2765 - protein, 12 aa, Artificial Sequence
  Synthetically generated peptide
CCEWCCPACTGC

SEQ ID NO: 2766 - protein, 11 aa, Artificial Sequence
  Synthetically generated peptide
CCEWCCACTGC

SEQ ID NO: 2767 - protein, 11 aa, Artificial Sequence
  Synthetically generated peptide
CCEWCCPCTGC

SEQ ID NO: 2768 - protein, 11 aa, Artificial Sequence
  Synthetically generated peptide
CCEWCCPACGC

SEQ ID NO: 2769 - protein, 11 aa, Artificial Sequence
  Synthetically generated peptide
CCEWCCPACTC

SEQ ID NO: 2770 - protein, 12 aa, Artificial Sequence
  Synthetically generated peptide
CCEWCCNACTGC

SEQ ID NO: 2771 - protein, 11 aa, Artificial Sequence
  Synthetically generated peptide
CCEWCCNCTGC

SEQ ID NO: 2772 - protein, 11 aa, Artificial Sequence
  Synthetically generated peptide
CCEWCCNACGC

SEQ ID NO: 2773 - protein, 11 aa, Artificial Sequence
  Synthetically generated peptide
CCEWCCNACTC

SEQ ID NO: 2774 - protein, 12 aa, Artificial Sequence
  Synthetically generated peptide
CCEWCCNPCTGC

SEQ ID NO: 2775 - protein, 11 aa, Artificial Sequence
  Synthetically generated peptide
CCEWCCNPCGC

SEQ ID NO: 2776 - protein, 11 aa, Artificial Sequence
  Synthetically generated peptide
CCEWCCNPCTC

SEQ ID NO: 2777 - protein, 12 aa, Artificial Sequence
  Synthetically generated peptide
CCEWCCNPACGC

SEQ ID NO: 2778 - protein, 11 aa, Artificial Sequence
  Synthetically generated peptide
CCEWCCNPACC

SEQ ID NO: 2779 - protein, 12 aa, Artificial Sequence
  Synthetically generated peptide
CCEWCCNPACTC

SEQ ID NO: 2780 - protein, 12 aa, Artificial Sequence
  Synthetically generated peptide
CCFCCNPACTGC

SEQ ID NO: 2781 - protein, 11 aa, Artificial Sequence
  Synthetically generated peptide
CCCCNPACTGC

SEQ ID NO: 2782 - protein, 11 aa, Artificial Sequence
  Synthetically generated peptide
CCFCCPACTGC

SEQ ID NO: 2783 - protein, 11 aa, Artificial Sequence
  Synthetically generated peptide
CCFCCNACTGC

SEQ ID NO: 2784 - protein, 11 aa, Artificial Sequence
  Synthetically generated peptide
CCFCCNPCTGC

SEQ ID NO: 2785 - protein, 11 aa, Artificial Sequence
  Synthetically generated peptide
CCFCCNPACGC

SEQ ID NO: 2786 - protein, 11 aa, Artificial Sequence
  Synthetically generated peptide
CCFCCNPACTC

SEQ ID NO: 2787 - protein, 12 aa, Artificial Sequence
  Synthetically generated peptide
CCECCNPACTGC

SEQ ID NO: 2788 - protein, 11 aa, Artificial Sequence
  Synthetically generated peptide
CCECCPACTGC

SEQ ID NO: 2789 - protein, 11 aa, Artificial Sequence
  Synthetically generated peptide
CCECCNACTGC

SEQ ID NO: 2790 - protein, 11 aa, Artificial Sequence
  Synthetically generated peptide
CCECCNPCTGC

SEQ ID NO: 2791 - protein, 11 aa, Artificial Sequence
  Synthetically generated peptide
CCECCNPACGC

SEQ ID NO: 2792 - protein, 11 aa, Artificial Sequence
  Synthetically generated peptide
CCECCNPACTC

SEQ ID NO: 2793 - protein, 12 aa, Artificial Sequence
  Synthetically generated peptide
CCEFCCPACTGC

SEQ ID NO: 2794 - protein, 11 aa, Artificial Sequence
  Synthetically generated peptide
CCEFCCACTGC

SEQ ID NO: 2795 - protein, 11 aa, Artificial Sequence
  Synthetically generated peptide
CCEFCCPCTGC

SEQ ID NO: 2796 - protein, 11 aa, Artificial Sequence
  Synthetically generated peptide
CCEFCCPACGC

SEQ ID NO: 2797 - protein, 11 aa, Artificial Sequence
  Synthetically generated peptide
CCEFCCPACTC

SEQ ID NO: 2798 - protein, 12 aa, Artificial Sequence
  Synthetically generated peptide
CCEFCCNACTGC

SEQ ID NO: 2799 - protein, 11 aa, Artificial Sequence
  Synthetically generated peptide
CCEFCCNCTGC

SEQ ID NO: 2800 - protein, 11 aa, Artificial Sequence
  Synthetically generated peptide
CCEFCCNACGC

SEQ ID NO: 2801 - protein, 11 aa, Artificial Sequence
  Synthetically generated peptide
CCEFCCNACTC

SEQ ID NO: 2802 - protein, 12 aa, Artificial Sequence
  Synthetically generated peptide
CCEFCCNPCTGC

SEQ ID NO: 2803 - protein, 11 aa, Artificial Sequence
  Synthetically generated peptide
CCEFCCNPCGC

SEQ ID NO: 2804 - protein, 11 aa, Artificial Sequence
  Synthetically generated peptide
CCEFCCNPCTC

SEQ ID NO: 2805 - protein, 12 aa, Artificial Sequence
  Synthetically generated peptide
CCEFCCNPACGC

SEQ ID NO: 2806 - protein, 11 aa, Artificial Sequence
  Synthetically generated peptide
CCEFCCNPACC

SEQ ID NO: 2807 - protein, 12 aa, Artificial Sequence
  Synthetically generated peptide
CCEFCCNPACTC

SEQ ID NO: 2808 - protein, 14 aa, Artificial Sequence
  Synthetically generated peptide
  VARIANT (1)..(14): Xaa = Any Amino Acid
CCXELCCNPACTGC

SEQ ID NO: 2809 - protein, 15 aa, Artificial Sequence
  Synthetically generated peptide
  VARIANT (1)..(15): Xaa = Any Amino Acid
CCXXELCCNPACTGC

SEQ ID NO: 2810 - protein, 16 aa, Artificial Sequence
  Synthetically generated peptide
  VARIANT (1)..(16): Xaa = Any Amino Acid
CCXXXELCCNPACTGC

SEQ ID NO: 2811 - protein, 17 aa, Artificial Sequence
  Synthetically generated peptide
  VARIANT (1)..(17): Xaa = Any Amino Acid
CCXXXXELCCNPACTGC

SEQ ID NO: 2812 - protein, 17 aa, Artificial Sequence
  Synthetically generated peptide
  VARIANT (1)..(17): Xaa = Any Amino Acid
CCXXXEXLCCNPACTGC

SEQ ID NO: 2813 - protein, 17 aa, Artificial Sequence
  Synthetically generated peptide
  VARIANT (1)..(17): Xaa = Any Amino Acid
CCXXXELXCCNPACTGC

SEQ ID NO: 2814 - protein, 17 aa, Artificial Sequence
  Synthetically generated peptide
  VARIANT (1)..(17): Xaa = Any Amino Acid
CCXXXELCCXNPACTGC

SEQ ID NO: 2815 - protein, 17 aa, Artificial Sequence
  Synthetically generated peptide
  VARIANT (1)..(17): Xaa = Any Amino Acid
CCXXXELCCNXPACTGC

SEQ ID NO: 2816 - protein, 17 aa, Artificial Sequence
  Synthetically generated peptide
  VARIANT (1)..(17): Xaa = Any Amino Acid
CCXXXELCCNPXACTGC

SEQ ID NO: 2817 - protein, 17 aa, Artificial Sequence
  Synthetically generated peptide
  VARIANT (1)..(17): Xaa = Any Amino Acid
CCXXXELCCNPAXCTGC

SEQ ID NO: 2818 - protein, 17 aa, Artificial Sequence
  Synthetically generated peptide
  VARIANT (1)..(17): Xaa = Any Amino Acid
CCXXXELCCNPACXTGC

SEQ ID NO: 2819 - protein, 17 aa, Artificial Sequence
  Synthetically generated peptide
  VARIANT (1)..(17): Xaa = Any Amino Acid
CCXXXELCCNPACTXGC

SEQ ID NO: 2820 - protein, 17 aa, Artificial Sequence
  Synthetically generated peptide
  VARIANT (1)..(17): Xaa = Any Amino Acid
CCXXXELCCNPACTGXC

SEQ ID NO: 2821 - protein, 16 aa, Artificial Sequence
  Synthetically generated peptide
  VARIANT (1)..(16): Xaa = Any Amino Acid
CCXXEXLCCNPACTGC

SEQ ID NO: 2822 - protein, 17 aa, Artificial Sequence
  Synthetically generated peptide
  VARIANT (1)..(17): Xaa = Any Amino Acid
CCXXEXXLCCNPACTGC

SEQ ID NO: 2823 - protein, 17 aa, Artificial Sequence
  Synthetically generated peptide
  VARIANT (1)..(17): Xaa = Any Amino Acid
CCXXEXLXCCNPACTGC

SEQ ID NO: 2824 - protein, 17 aa, Artificial Sequence
  Synthetically generated peptide
  VARIANT (1)..(17): Xaa = Any Amino Acid
CCXXEXLCCXNPACTGC

SEQ ID NO: 2825 - protein, 17 aa, Artificial Sequence
  Synthetically generated peptide
  VARIANT (1)..(17): Xaa = Any Amino Acid
CCXXEXLCCNXPACTGC

SEQ ID NO: 2826 - protein, 17 aa, Artificial Sequence
  Synthetically generated peptide
  VARIANT (1)..(17): Xaa = Any Amino Acid
CCXXEXLCCNPXACTGC

SEQ ID NO: 2827 - protein, 17 aa, Artificial Sequence
  Synthetically generated peptide
  VARIANT (1)..(17): Xaa = Any Amino Acid
CCXXEXLCCNPAXCTGC

SEQ ID NO: 2828 - protein, 17 aa, Artificial Sequence
  Synthetically generated peptide
  VARIANT (1)..(17): Xaa = Any Amino Acid
CCXXEXLCCNPACXTGC

SEQ ID NO: 2829 - protein, 17 aa, Artificial Sequence
  Synthetically generated peptide
  VARIANT (1)..(17): Xaa = Any Amino Acid
CCXXEXLCCNPACTXGC

SEQ ID NO: 2830 - protein, 17 aa, Artificial Sequence
  Synthetically generated peptide
  VARIANT (1)..(17): Xaa = Any Amino Acid
CCXXEXLCCNPACTGXC

SEQ ID NO: 2831 - protein, 16 aa, Artificial Sequence
  Synthetically generated peptide
  VARIANT (1)..(16): Xaa = Any Amino Acid
CCXXELXCCNPACTGC

SEQ ID NO: 2832 - protein, 17 aa, Artificial Sequence
  Synthetically generated peptide
  VARIANT (1)..(17): Xaa = Any Amino Acid
CCXXELXXCCNPACTGC

SEQ ID NO: 2833 - protein, 17 aa, Artificial Sequence
  Synthetically generated peptide
  VARIANT (1)..(17): Xaa = Any Amino Acid
CCXXELXCCXNPACTGC

SEQ ID NO: 2834 - protein, 17 aa, Artificial Sequence
  Synthetically generated peptide
  VARIANT (1)..(17): Xaa = Any Amino Acid
CCXXELXCCNXPACTGC

SEQ ID NO: 2835 - protein, 17 aa, Artificial Sequence
  Synthetically generated peptide
  VARIANT (1)..(17): Xaa = Any Amino Acid
CCXXELXCCNPXACTGC

SEQ ID NO: 2836 - protein, 17 aa, Artificial Sequence
  Synthetically generated peptide
  VARIANT (1)..(17): Xaa = Any Amino Acid
CCXXELXCCNPAXCTGC

SEQ ID NO: 2837 - protein, 17 aa, Artificial Sequence
  Synthetically generated peptide
  VARIANT (1)..(17): Xaa = Any Amino Acid
CCXXELXCCNPACXTGC

SEQ ID NO: 2838 - protein, 17 aa, Artificial Sequence
  Synthetically generated peptide
  VARIANT (1)..(17): Xaa = Any Amino Acid
CCXXELXCCNPACTXGC

SEQ ID NO: 2839 - protein, 17 aa, Artificial Sequence
  Synthetically generated peptide
  VARIANT (1)..(17): Xaa = Any Amino Acid
CCXXELXCCNPACTGXC

SEQ ID NO: 2840 - protein, 16 aa, Artificial Sequence
  Synthetically generated peptide
  VARIANT (1)..(16): Xaa = Any Amino Acid
CCXXELCCXNPACTGC

SEQ ID NO: 2841 - protein, 17 aa, Artificial Sequence
  Synthetically generated peptide
  VARIANT (1)..(17): Xaa = Any Amino Acid
CCXXELCCXXNPACTGC

SEQ ID NO: 2842 - protein, 17 aa, Artificial Sequence
  Synthetically generated peptide
  VARIANT (1)..(17): Xaa = Any Amino Acid
CCXXELCCXNXPACTGC

SEQ ID NO: 2843 - protein, 17 aa, Artificial Sequence
  Synthetically generated peptide
  VARIANT (1)..(17): Xaa = Any Amino Acid
CCXXELCCXNPXACTGC

SEQ ID NO: 2844 - protein, 17 aa, Artificial Sequence
  Synthetically generated peptide
  VARIANT (1)..(17): Xaa = Any Amino Acid
CCXXELCCXNPAXCTGC

SEQ ID NO: 2845 - protein, 17 aa, Artificial Sequence
  Synthetically generated peptide
  VARIANT (1)..(17): Xaa = Any Amino Acid
CCXXELCCXNPACXTGC

SEQ ID NO: 2846 - protein, 17 aa, Artificial Sequence
  Synthetically generated peptide
  VARIANT (1)..(17): Xaa = Any Amino Acid
CCXXELCCXNPACTXGC

SEQ ID NO: 2847 - protein, 17 aa, Artificial Sequence
  Synthetically generated peptide
  VARIANT (1)..(17): Xaa = Any Amino Acid
CCXXELCCXNPACTGXC

SEQ ID NO: 2848 - protein, 16 aa, Artificial Sequence
  Synthetically generated peptide
  VARIANT (1)..(16): Xaa = Any Amino Acid
CCXXELCCNXPACTGC

SEQ ID NO: 2849 - protein, 17 aa, Artificial Sequence
  Synthetically generated peptide
  VARIANT (1)..(17): Xaa = Any Amino Acid
CCXXELCCNXXPACTGC

SEQ ID NO: 2850 - protein, 17 aa, Artificial Sequence
  Synthetically generated peptide
  VARIANT (1)..(17): Xaa = Any Amino Acid
CCXXELCCNXPXACTGC

SEQ ID NO: 2851 - protein, 17 aa, Artificial Sequence
  Synthetically generated peptide
  VARIANT (1)..(17): Xaa = Any Amino Acid
CCXXELCCNXPAXCTGC

SEQ ID NO: 2852 - protein, 17 aa, Artificial Sequence
  Synthetically generated peptide
  VARIANT (1)..(17): Xaa = Any Amino Acid
CCXXELCCNXPACXTGC

SEQ ID NO: 2853 - protein, 17 aa, Artificial Sequence
  Synthetically generated peptide
  VARIANT (1)..(17): Xaa = Any Amino Acid
CCXXELCCNXPACTXGC

SEQ ID NO: 2854 - protein, 17 aa, Artificial Sequence
  Synthetically generated peptide
  VARIANT (1)..(17): Xaa = Any Amino Acid
CCXXELCCNXPACTGXC

SEQ ID NO: 2855 - protein, 16 aa, Artificial Sequence
  Synthetically generated peptide
  VARIANT (1)..(16): Xaa = Any Amino Acid
CCXXELCCNPXACTGC

SEQ ID NO: 2856 - protein, 17 aa, Artificial Sequence
  Synthetically generated peptide
  VARIANT (1)..(17): Xaa = Any Amino Acid
CCXXELCCNPXXACTGC

SEQ ID NO: 2857 - protein, 17 aa, Artificial Sequence
  Synthetically generated peptide
  VARIANT (1)..(17): Xaa = Any Amino Acid
CCXXELCCNPXAXCTGC

SEQ ID NO: 2858 - protein, 17 aa, Artificial Sequence
  Synthetically generated peptide
  VARIANT (1)..(17): Xaa = Any Amino Acid
CCXXELCCNPXACXTGC

SEQ ID NO: 2859 - protein, 17 aa, Artificial Sequence
  Synthetically generated peptide
  VARIANT (1)..(17): Xaa = Any Amino Acid
CCXXELCCNPXACTXGC

SEQ ID NO: 2860 - protein, 17 aa, Artificial Sequence
  Synthetically generated peptide
  VARIANT (1)..(17): Xaa = Any Amino Acid
CCXXELCCNPXACTGXC

SEQ ID NO: 2861 - protein, 16 aa, Artificial Sequence
  Synthetically generated peptide
  VARIANT (1)..(16): Xaa = Any Amino Acid
CCXXELCCNPAXCTGC

SEQ ID NO: 2862 - protein, 17 aa, Artificial Sequence
  Synthetically generated peptide
  VARIANT (1)..(17): Xaa = Any Amino Acid
CCXXELCCNPAXXCTGC

SEQ ID NO: 2863 - protein, 17 aa, Artificial Sequence
  Synthetically generated peptide
  VARIANT (1)..(17): Xaa = Any Amino Acid
CCXXELCCNPAXCXTGC

SEQ ID NO: 2864 - protein, 17 aa, Artificial Sequence
  Synthetically generated peptide
  VARIANT (1)..(17): Xaa = Any Amino Acid
CCXXELCCNPAXCTXGC

SEQ ID NO: 2865 - protein, 17 aa, Artificial Sequence
  Synthetically generated peptide
  VARIANT (1)..(17): Xaa = Any Amino Acid
CCXXELCCNPAXCTGXC

SEQ ID NO: 2866 - protein, 16 aa, Artificial Sequence
  Synthetically generated peptide
  VARIANT (1)..(16): Xaa = Any Amino Acid
CCXXELCCNPACXTGC

SEQ ID NO: 2867 - protein, 17 aa, Artificial Sequence
  Synthetically generated peptide
  VARIANT (1)..(17): Xaa = Any Amino Acid
CCXXELCCNPACXXTGC

SEQ ID NO: 2868 - protein, 17 aa, Artificial Sequence
  Synthetically generated peptide
  VARIANT (1)..(17): Xaa = Any Amino Acid
CCXXELCCNPACXTXGC

SEQ ID NO: 2869 - protein, 17 aa, Artificial Sequence
  Synthetically generated peptide
  VARIANT (1)..(17): Xaa = Any Amino Acid
CCXXELCCNPACXTGXC

SEQ ID NO: 2870 - protein, 16 aa, Artificial Sequence
  Synthetically generated peptide
  VARIANT (1)..(16): Xaa = Any Amino Acid
CCXXELCCNPACTXGC

SEQ ID NO: 2871 - protein, 17 aa, Artificial Sequence
  Synthetically generated peptide
  VARIANT (1)..(17): Xaa = Any Amino Acid
CCXXELCCNPACTXXGC

SEQ ID NO: 2872 - protein, 17 aa, Artificial Sequence
  Synthetically generated peptide
  VARIANT (1)..(17): Xaa = Any Amino Acid
CCXXELCCNPACTXGXC

SEQ ID NO: 2873 - protein, 16 aa, Artificial Sequence
  Synthetically generated peptide
  VARIANT (1)..(16): Xaa = Any Amino Acid
CCXXELCCNPACTGXC

SEQ ID NO: 2874 - protein, 17 aa, Artificial Sequence
  Synthetically generated peptide
  VARIANT (1)..(17): Xaa = Any Amino Acid
CCXXELCCNPACTGXXC

SEQ ID NO: 2875 - protein, 15 aa, Artificial Sequence
  Synthetically generated peptide
  VARIANT (1)..(15): Xaa = Any Amino Acid
CCXEXLCCNPACTGC

SEQ ID NO: 2876 - protein, 16 aa, Artificial Sequence
  Synthetically generated peptide
  VARIANT (1)..(16): Xaa = Any Amino Acid
CCXEXXLCCNPACTGC

SEQ ID NO: 2877 - protein, 17 aa, Artificial Sequence
  Synthetically generated peptide
  VARIANT (1)..(17): Xaa = Any Amino Acid
CCXEXXXLCCNPACTGC

SEQ ID NO: 2878 - protein, 17 aa, Artificial Sequence
  Synthetically generated peptide
  VARIANT (1)..(17): Xaa = Any Amino Acid
CCXEXXLXCCNPACTGC

SEQ ID NO: 2879 - protein, 17 aa, Artificial Sequence
  Synthetically generated peptide
  VARIANT (1)..(17): Xaa = Any Amino Acid
CCXEXXLCCXNPACTGC

SEQ ID NO: 2880 - protein, 17 aa, Artificial Sequence
  Synthetically generated peptide
  VARIANT (1)..(17): Xaa = Any Amino Acid
CCXEXXLCCNXPACTGC

SEQ ID NO: 2881 - protein, 17 aa, Artificial Sequence
  Synthetically generated peptide
  VARIANT (1)..(17): Xaa = Any Amino Acid
CCXEXXLCCNPXACTGC

SEQ ID NO: 2882 - protein, 17 aa, Artificial Sequence
  Synthetically generated peptide
  VARIANT (1)..(17): Xaa = Any Amino Acid
CCXEXXLCCNPAXCTGC

SEQ ID NO: 2883 - protein, 17 aa, Artificial Sequence
  Synthetically generated peptide
  VARIANT (1)..(17): Xaa = Any Amino Acid
CCXEXXLCCNPACXTGC

SEQ ID NO: 2884 - protein, 17 aa, Artificial Sequence
  Synthetically generated peptide
  VARIANT (1)..(17): Xaa = Any Amino Acid
CCXEXXLCCNPACTXGC

SEQ ID NO: 2885 - protein, 17 aa, Artificial Sequence
  Synthetically generated peptide
  VARIANT (1)..(17): Xaa = Any Amino Acid
CCXEXXLCCNPACTGXC

SEQ ID NO: 2886 - protein, 16 aa, Artificial Sequence
  Synthetically generated peptide
  VARIANT (1)..(16): Xaa = Any Amino Acid
CCXEXLXCCNPACTGC

SEQ ID NO: 2887 - protein, 17 aa, Artificial Sequence
  Synthetically generated peptide
  VARIANT (1)..(17): Xaa = Any Amino Acid
CCXEXLXXCCNPACTGC

SEQ ID NO: 2888 - protein, 17 aa, Artificial Sequence
  Synthetically generated peptide
  VARIANT (1)..(17): Xaa = Any Amino Acid
CCXEXLXCCXNPACTGC

SEQ ID NO: 2889 - protein, 17 aa, Artificial Sequence
  Synthetically generated peptide
  VARIANT (1)..(17): Xaa = Any Amino Acid
CCXEXLXCCNXPACTGC

SEQ ID NO: 2890 - protein, 17 aa, Artificial Sequence
  Synthetically generated peptide
  VARIANT (1)..(17): Xaa = Any Amino Acid
CCXEXLXCCNPXACTGC

SEQ ID NO: 2891 - protein, 17 aa, Artificial Sequence
  Synthetically generated peptide
  VARIANT (1)..(17): Xaa = Any Amino Acid
CCXEXLXCCNPAXCTGC

SEQ ID NO: 2892 - protein, 17 aa, Artificial Sequence
  Synthetically generated peptide
  VARIANT (1)..(17): Xaa = Any Amino Acid
CCXEXLXCCNPACXTGC

SEQ ID NO: 2893 - protein, 17 aa, Artificial Sequence
  Synthetically generated peptide
  VARIANT (1)..(17): Xaa = Any Amino Acid
CCXEXLXCCNPACTXGC

SEQ ID NO: 2894 - protein, 17 aa, Artificial Sequence
  Synthetically generated peptide
  VARIANT (1)..(17): Xaa = Any Amino Acid
CCXEXLXCCNPACTGXC

SEQ ID NO: 2895 - protein, 16 aa, Artificial Sequence
  Synthetically generated peptide
  VARIANT (1)..(16): Xaa = Any Amino Acid
CCXEXLCCXNPACTGC

SEQ ID NO: 2896 - protein, 17 aa, Artificial Sequence
  Synthetically generated peptide
  VARIANT (1)..(17): Xaa = Any Amino Acid
CCXEXLCCXXNPACTGC

SEQ ID NO: 2897 - protein, 17 aa, Artificial Sequence
  Synthetically generated peptide
  VARIANT (1)..(17): Xaa = Any Amino Acid
CCXEXLCCXNXPACTGC

SEQ ID NO: 2898 - protein, 17 aa, Artificial Sequence
  Synthetically generated peptide
  VARIANT (1)..(17): Xaa = Any Amino Acid
CCXEXLCCXNPXACTGC

SEQ ID NO: 2899 - protein, 17 aa, Artificial Sequence
  Synthetically generated peptide
  VARIANT (1)..(17): Xaa = Any Amino Acid
CCXEXLCCXNPAXCTGC

SEQ ID NO: 2900 - protein, 17 aa, Artificial Sequence
  Synthetically generated peptide
  VARIANT (1)..(17): Xaa = Any Amino Acid
CCXEXLCCXNPACXTGC

SEQ ID NO: 2901 - protein, 17 aa, Artificial Sequence
  Synthetically generated peptide
  VARIANT (1)..(17): Xaa = Any Amino Acid
CCXEXLCCXNPACTXGC

SEQ ID NO: 2902 - protein, 17 aa, Artificial Sequence
  Synthetically generated peptide
  VARIANT (1)..(17): Xaa = Any Amino Acid
CCXEXLCCXNPACTGXC

SEQ ID NO: 2903 - protein, 16 aa, Artificial Sequence
  Synthetically generated peptide
  VARIANT (1)..(16): Xaa = Any Amino Acid
CCXEXLCCNXPACTGC

SEQ ID NO: 2904 - protein, 17 aa, Artificial Sequence
  Synthetically generated peptide
  VARIANT (1)..(17): Xaa = Any Amino Acid
CCXEXLCCNXXPACTGC

SEQ ID NO: 2905 - protein, 17 aa, Artificial Sequence
  Synthetically generated peptide
  VARIANT (1)..(17): Xaa = Any Amino Acid
CCXEXLCCNXPXACTGC

SEQ ID NO: 2906 - protein, 17 aa, Artificial Sequence
  Synthetically generated peptide
  VARIANT (1)..(17): Xaa = Any Amino Acid
CCXEXLCCNXPAXCTGC

SEQ ID NO: 2907 - protein, 17 aa, Artificial Sequence
  Synthetically generated peptide
  VARIANT (1)..(17): Xaa = Any Amino Acid
CCXEXLCCNXPACXTGC

SEQ ID NO: 2908 - protein, 17 aa, Artificial Sequence
  Synthetically generated peptide
  VARIANT (1)..(17): Xaa = Any Amino Acid
CCXEXLCCNXPACTXGC

SEQ ID NO: 2909 - protein, 17 aa, Artificial Sequence
  Synthetically generated peptide
  VARIANT (1)..(17): Xaa = Any Amino Acid
CCXEXLCCNXPACTGXC

SEQ ID NO: 2910 - protein, 16 aa, Artificial Sequence
  Synthetically generated peptide
  VARIANT (1)..(16): Xaa = Any Amino Acid
CCXEXLCCNPXACTGC

SEQ ID NO: 2911 - protein, 17 aa, Artificial Sequence
  Synthetically generated peptide
  VARIANT (1)..(17): Xaa = Any Amino Acid
CCXEXLCCNPXXACTGC

SEQ ID NO: 2912 - protein, 17 aa, Artificial Sequence
  Synthetically generated peptide
  VARIANT (1)..(17): Xaa = Any Amino Acid
CCXEXLCCNPXAXCTGC

SEQ ID NO: 2913 - protein, 17 aa, Artificial Sequence
  Synthetically generated peptide
  VARIANT (1)..(17): Xaa = Any Amino Acid
CCXEXLCCNPXACXTGC

SEQ ID NO: 2914 - protein, 17 aa, Artificial Sequence
  Synthetically generated peptide
  VARIANT (1)..(17): Xaa = Any Amino Acid
CCXEXLCCNPXACTXGC

SEQ ID NO: 2915 - protein, 17 aa, Artificial Sequence
  Synthetically generated peptide
  VARIANT (1)..(17): Xaa = Any Amino Acid
CCXEXLCCNPXACTGXC

SEQ ID NO: 2916 - protein, 16 aa, Artificial Sequence
  Synthetically generated peptide
  VARIANT (1)..(16): Xaa = Any Amino Acid
CCXEXLCCNPAXCTGC

SEQ ID NO: 2917 - protein, 17 aa, Artificial Sequence
  Synthetically generated peptide
  VARIANT (1)..(17): Xaa = Any Amino Acid
CCXEXLCCNPAXXCTGC

SEQ ID NO: 2918 - protein, 17 aa, Artificial Sequence
  Synthetically generated peptide
  VARIANT (1)..(17): Xaa = Any Amino Acid
CCXEXLCCNPAXCXTGC

SEQ ID NO: 2919 - protein, 17 aa, Artificial Sequence
  Synthetically generated peptide
  VARIANT (1)..(17): Xaa = Any Amino Acid
CCXEXLCCNPAXCTXGC

SEQ ID NO: 2920 - protein, 17 aa, Artificial Sequence
  Synthetically generated peptide
  VARIANT (1)..(17): Xaa = Any Amino Acid
CCXEXLCCNPAXCTGXC

SEQ ID NO: 2921 - protein, 16 aa, Artificial Sequence
  Synthetically generated peptide
  VARIANT (1)..(16): Xaa = Any Amino Acid
CCXEXLCCNPACXTGC

SEQ ID NO: 2922 - protein, 17 aa, Artificial Sequence
  Synthetically generated peptide
  VARIANT (1)..(17): Xaa = Any Amino Acid
CCXEXLCCNPACXXTGC

SEQ ID NO: 2923 - protein, 17 aa, Artificial Sequence
  Synthetically generated peptide
  VARIANT (1)..(17): Xaa = Any Amino Acid
CCXEXLCCNPACXTXGC

SEQ ID NO: 2924 - protein, 17 aa, Artificial Sequence
  Synthetically generated peptide
  VARIANT (1)..(17): Xaa = Any Amino Acid
CCXEXLCCNPACXTGXC

SEQ ID NO: 2925 - protein, 16 aa, Artificial Sequence
  Synthetically generated peptide
  VARIANT (1)..(16): Xaa = Any Amino Acid
CCXEXLCCNPACTXGC

SEQ ID NO: 2926 - protein, 17 aa, Artificial Sequence
  Synthetically generated peptide
  VARIANT (1)..(17): Xaa = Any Amino Acid
CCXEXLCCNPACTXXGC

SEQ ID NO: 2927 - protein, 17 aa, Artificial Sequence
  Synthetically generated peptide
  VARIANT (1)..(17): Xaa = Any Amino Acid
CCXEXLCCNPACTXGXC

SEQ ID NO: 2928 - protein, 16 aa, Artificial Sequence
  Synthetically generated peptide
  VARIANT (1)..(16): Xaa = Any Amino Acid
CCXEXLCCNPACTGXC

SEQ ID NO: 2929 - protein, 17 aa, Artificial Sequence
  Synthetically generated peptide
  VARIANT (1)..(17): Xaa = Any Amino Acid
CCXEXLCCNPACTGXXC

SEQ ID NO: 2930 - protein, 15 aa, Artificial Sequence
  Synthetically generated peptide
  VARIANT (1)..(15): Xaa = Any Amino Acid
CCXELXCCNPACTGC

SEQ ID NO: 2931 - protein, 16 aa, Artificial Sequence
  Synthetically generated peptide
  VARIANT (1)..(16): Xaa = Any Amino Acid
CCXELXXCCNPACTGC

SEQ ID NO: 2932 - protein, 17 aa, Artificial Sequence
  Synthetically generated peptide
  VARIANT (1)..(17): Xaa = Any Amino Acid
CCXELXXXCCNPACTGC

SEQ ID NO: 2933 - protein, 17 aa, Artificial Sequence
  Synthetically generated peptide
  VARIANT (1)..(17): Xaa = Any Amino Acid
CCXELXXCCXNPACTGC

SEQ ID NO: 2934 - protein, 17 aa, Artificial Sequence
  Synthetically generated peptide
  VARIANT (1)..(17): Xaa = Any Amino Acid
CCXELXXCCNXPACTGC

SEQ ID NO: 2935 - protein, 17 aa, Artificial Sequence
  Synthetically generated peptide
  VARIANT (1)..(17): Xaa = Any Amino Acid
CCXELXXCCNPXACTGC

SEQ ID NO: 2936 - protein, 17 aa, Artificial Sequence
  Synthetically generated peptide
  VARIANT (1)..(17): Xaa = Any Amino Acid
CCXELXXCCNPAXCTGC

SEQ ID NO: 2937 - protein, 17 aa, Artificial Sequence
  Synthetically generated peptide
  VARIANT (1)..(17): Xaa = Any Amino Acid
CCXELXXCCNPACXTGC

SEQ ID NO: 2938 - protein, 17 aa, Artificial Sequence
  Synthetically generated peptide
  VARIANT (1)..(17): Xaa = Any Amino Acid
CCXELXXCCNPACTXGC

SEQ ID NO: 2939 - protein, 17 aa, Artificial Sequence
  Synthetically generated peptide
  VARIANT (1)..(17): Xaa = Any Amino Acid
CCXELXXCCNPACTGXC

SEQ ID NO: 2940 - protein, 16 aa, Artificial Sequence
  Synthetically generated peptide
  VARIANT (1)..(16): Xaa = Any Amino Acid
CCXELXCCXNPACTGC

SEQ ID NO: 2941 - protein, 17 aa, Artificial Sequence
  Synthetically generated peptide
  VARIANT (1)..(17): Xaa = Any Amino Acid
CCXELXCCXXNPACTGC

SEQ ID NO: 2942 - protein, 17 aa, Artificial Sequence
  Synthetically generated peptide
  VARIANT (1)..(17): Xaa = Any Amino Acid
CCXELXCCXNXPACTGC

SEQ ID NO: 2943 - protein, 17 aa, Artificial Sequence
  Synthetically generated peptide
  VARIANT (1)..(17): Xaa = Any Amino Acid
CCXELXCCXNPXACTGC

SEQ ID NO: 2944 - protein, 17 aa, Artificial Sequence
  Synthetically generated peptide
  VARIANT (1)..(17): Xaa = Any Amino Acid
CCXELXCCXNPAXCTGC

SEQ ID NO: 2945 - protein, 17 aa, Artificial Sequence
  Synthetically generated peptide
  VARIANT (1)..(17): Xaa = Any Amino Acid
CCXELXCCXNPACXTGC

SEQ ID NO: 2946 - protein, 17 aa, Artificial Sequence
  Synthetically generated peptide
  VARIANT (1)..(17): Xaa = Any Amino Acid
CCXELXCCXNPACTXGC

SEQ ID NO: 2947 - protein, 17 aa, Artificial Sequence
  Synthetically generated peptide
  VARIANT (1)..(17): Xaa = Any Amino Acid
CCXELXCCXNPACTGXC

SEQ ID NO: 2948 - protein, 16 aa, Artificial Sequence
  Synthetically generated peptide
  VARIANT (1)..(16): Xaa = Any Amino Acid
CCXELXCCNXPACTGC

SEQ ID NO: 2949 - protein, 17 aa, Artificial Sequence
  Synthetically generated peptide
  VARIANT (1)..(17): Xaa = Any Amino Acid
CCXELXCCNXXPACTGC

SEQ ID NO: 2950 - protein, 17 aa, Artificial Sequence
  Synthetically generated peptide
  VARIANT (1)..(17): Xaa = Any Amino Acid
CCXELXCCNXPXACTGC

SEQ ID NO: 2951 - protein, 17 aa, Artificial Sequence
  Synthetically generated peptide
  VARIANT (1)..(17): Xaa = Any Amino Acid
CCXELXCCNXPAXCTGC

SEQ ID NO: 2952 - protein, 17 aa, Artificial Sequence
  Synthetically generated peptide
  VARIANT (1)..(17): Xaa = Any Amino Acid
CCXELXCCNXPACXTGC

SEQ ID NO: 2953 - protein, 17 aa, Artificial Sequence
  Synthetically generated peptide
  VARIANT (1)..(17): Xaa = Any Amino Acid
CCXELXCCNXPACTXGC

SEQ ID NO: 2954 - protein, 17 aa, Artificial Sequence
  Synthetically generated peptide
  VARIANT (1)..(17): Xaa = Any Amino Acid
CCXELXCCNXPACTGXC

SEQ ID NO: 2955 - protein, 16 aa, Artificial Sequence
  Synthetically generated peptide
  VARIANT (1)..(16): Xaa = Any Amino Acid
CCXELXCCNPXACTGC

SEQ ID NO: 2956 - protein, 17 aa, Artificial Sequence
  Synthetically generated peptide
  VARIANT (1)..(17): Xaa = Any Amino Acid
CCXELXCCNPXXACTGC

SEQ ID NO: 2957 - protein, 17 aa, Artificial Sequence
  Synthetically generated peptide
  VARIANT (1)..(17): Xaa = Any Amino Acid
CCXELXCCNPXAXCTGC

SEQ ID NO: 2958 - protein, 17 aa, Artificial Sequence
  Synthetically generated peptide
  VARIANT (1)..(17): Xaa = Any Amino Acid
CCXELXCCNPXACXTGC

SEQ ID NO: 2959 - protein, 17 aa, Artificial Sequence
  Synthetically generated peptide
  VARIANT (1)..(17): Xaa = Any Amino Acid
CCXELXCCNPXACTXGC

SEQ ID NO: 2960 - protein, 17 aa, Artificial Sequence
  Synthetically generated peptide
  VARIANT (1)..(17): Xaa = Any Amino Acid
CCXELXCCNPXACTGXC

SEQ ID NO: 2961 - protein, 16 aa, Artificial Sequence
  Synthetically generated peptide
  VARIANT (1)..(16): Xaa = Any Amino Acid
CCXELXCCNPAXCTGC

SEQ ID NO: 2962 - protein, 17 aa, Artificial Sequence
  Synthetically generated peptide
  VARIANT (1)..(17): Xaa = Any Amino Acid
CCXELXCCNPAXXCTGC

SEQ ID NO: 2963 - protein, 17 aa, Artificial Sequence
  Synthetically generated peptide
  VARIANT (1)..(17): Xaa = Any Amino Acid
CCXELXCCNPAXCXTGC

SEQ ID NO: 2964 - protein, 17 aa, Artificial Sequence
  Synthetically generated peptide
  VARIANT (1)..(17): Xaa = Any Amino Acid
CCXELXCCNPAXCTXGC

SEQ ID NO: 2965 - protein, 17 aa, Artificial Sequence
  Synthetically generated peptide
  VARIANT (1)..(17): Xaa = Any Amino Acid
CCXELXCCNPAXCTGXC

SEQ ID NO: 2966 - protein, 16 aa, Artificial Sequence
  Synthetically generated peptide
  VARIANT (1)..(16): Xaa = Any Amino Acid
CCXELXCCNPACXTGC

SEQ ID NO: 2967 - protein, 17 aa, Artificial Sequence
  Synthetically generated peptide
  VARIANT (1)..(17): Xaa = Any Amino Acid
CCXELXCCNPACXXTGC

SEQ ID NO: 2968 - protein, 17 aa, Artificial Sequence
  Synthetically generated peptide
  VARIANT (1)..(17): Xaa = Any Amino Acid
CCXELXCCNPACXTXGC

SEQ ID NO: 2969 - protein, 17 aa, Artificial Sequence
  Synthetically generated peptide
  VARIANT (1)..(17): Xaa = Any Amino Acid
CCXELXCCNPACXTGXC

SEQ ID NO: 2970 - protein, 16 aa, Artificial Sequence
  Synthetically generated peptide
  VARIANT (1)..(16): Xaa = Any Amino Acid
CCXELXCCNPACTXGC

SEQ ID NO: 2971 - protein, 17 aa, Artificial Sequence
  Synthetically generated peptide
  VARIANT (1)..(17): Xaa = Any Amino Acid
CCXELXCCNPACTXXGC

SEQ ID NO: 2972 - protein, 17 aa, Artificial Sequence
  Synthetically generated peptide
  VARIANT (1)..(17): Xaa = Any Amino Acid
CCXELXCCNPACTXGXC

SEQ ID NO: 2973 - protein, 16 aa, Artificial Sequence
  Synthetically generated peptide
  VARIANT (1)..(16): Xaa = Any Amino Acid
CCXELXCCNPACTGXC

SEQ ID NO: 2974 - protein, 17 aa, Artificial Sequence
  Synthetically generated peptide
  VARIANT (1)..(17): Xaa = Any Amino Acid
CCXELXCCNPACTGXXC

SEQ ID NO: 2975 - protein, 15 aa, Artificial Sequence
  Synthetically generated peptide
  VARIANT (1)..(15): Xaa = Any Amino Acid
CCXELCCXNPACTGC

SEQ ID NO: 2976 - protein, 16 aa, Artificial Sequence
  Synthetically generated peptide
  VARIANT (1)..(16): Xaa = Any Amino Acid
CCXELCCXXNPACTGC

SEQ ID NO: 2977 - protein, 17 aa, Artificial Sequence
  Synthetically generated peptide
  VARIANT (1)..(17): Xaa = Any Amino Acid
CCXELCCXXXNPACTGC

SEQ ID NO: 2978 - protein, 17 aa, Artificial Sequence
  Synthetically generated peptide
  VARIANT (1)..(17): Xaa = Any Amino Acid
CCXELCCXXNXPACTGC

SEQ ID NO: 2979 - protein, 17 aa, Artificial Sequence
  Synthetically generated peptide
  VARIANT (1)..(17): Xaa = Any Amino Acid
CCXELCCXXNPXACTGC

SEQ ID NO: 2980 - protein, 17 aa, Artificial Sequence
  Synthetically generated peptide
  VARIANT (1)..(17): Xaa = Any Amino Acid
CCXELCCXXNPAXCTGC

SEQ ID NO: 2981 - protein, 17 aa, Artificial Sequence
  Synthetically generated peptide
  VARIANT (1)..(17): Xaa = Any Amino Acid
CCXELCCXXNPACXTGC

SEQ ID NO: 2982 - protein, 17 aa, Artificial Sequence
  Synthetically generated peptide
  VARIANT (1)..(17): Xaa = Any Amino Acid
CCXELCCXXNPACTXGC

SEQ ID NO: 2983 - protein, 17 aa, Artificial Sequence
  Synthetically generated peptide
  VARIANT (1)..(17): Xaa = Any Amino Acid
CCXELCCXXNPACTGXC

SEQ ID NO: 2984 - protein, 16 aa, Artificial Sequence
  Synthetically generated peptide
  VARIANT (1)..(16): Xaa = Any Amino Acid
CCXELCCXNXPACTGC

SEQ ID NO: 2985 - protein, 17 aa, Artificial Sequence
  Synthetically generated peptide
  VARIANT (1)..(17): Xaa = Any Amino Acid
CCXELCCXNXXPACTGC

SEQ ID NO: 2986 - protein, 17 aa, Artificial Sequence
  Synthetically generated peptide
  VARIANT (1)..(17): Xaa = Any Amino Acid
CCXELCCXNXPXACTGC

SEQ ID NO: 2987 - protein, 17 aa, Artificial Sequence
  Synthetically generated peptide
  VARIANT (1)..(17): Xaa = Any Amino Acid
CCXELCCXNXPAXCTGC

SEQ ID NO: 2988 - protein, 17 aa, Artificial Sequence
  Synthetically generated peptide
  VARIANT (1)..(17): Xaa = Any Amino Acid
CCXELCCXNXPACXTGC

SEQ ID NO: 2989 - protein, 17 aa, Artificial Sequence
  Synthetically generated peptide
  VARIANT (1)..(17): Xaa = Any Amino Acid
CCXELCCXNXPACTXGC

SEQ ID NO: 2990 - protein, 17 aa, Artificial Sequence
  Synthetically generated peptide
  VARIANT (1)..(17): Xaa = Any Amino Acid
CCXELCCXNXPACTGXC

SEQ ID NO: 2991 - protein, 16 aa, Artificial Sequence
  Synthetically generated peptide
  VARIANT (1)..(16): Xaa = Any Amino Acid
CCXELCCXNPXACTGC

SEQ ID NO: 2992 - protein, 17 aa, Artificial Sequence
  Synthetically generated peptide
  VARIANT (1)..(17): Xaa = Any Amino Acid
CCXELCCXNPXXACTGC

SEQ ID NO: 2993 - protein, 17 aa, Artificial Sequence
  Synthetically generated peptide
  VARIANT (1)..(17): Xaa = Any Amino Acid
CCXELCCXNPXAXCTGC

SEQ ID NO: 2994 - protein, 17 aa, Artificial Sequence
  Synthetically generated peptide
  VARIANT (1)..(17): Xaa = Any Amino Acid
CCXELCCXNPXACXTGC

SEQ ID NO: 2995 - protein, 17 aa, Artificial Sequence
  Synthetically generated peptide
  VARIANT (1)..(17): Xaa = Any Amino Acid
CCXELCCXNPXACTXGC

SEQ ID NO: 2996 - protein, 17 aa, Artificial Sequence
  Synthetically generated peptide
  VARIANT (1)..(17): Xaa = Any Amino Acid
CCXELCCXNPXACTGXC

SEQ ID NO: 2997 - protein, 16 aa, Artificial Sequence
  Synthetically generated peptide
  VARIANT (1)..(16): Xaa = Any Amino Acid
CCXELCCXNPAXCTGC

SEQ ID NO: 2998 - protein, 17 aa, Artificial Sequence
  Synthetically generated peptide
  VARIANT (1)..(17): Xaa = Any Amino Acid
CCXELCCXNPAXXCTGC

SEQ ID NO: 2999 - protein, 17 aa, Artificial Sequence
  Synthetically generated peptide
  VARIANT (1)..(17): Xaa = Any Amino Acid
CCXELCCXNPAXCXTGC

SEQ ID NO: 3000 - protein, 17 aa, Artificial Sequence
  Synthetically generated peptide
  VARIANT (1)..(17): Xaa = Any Amino Acid
CCXELCCXNPAXCTXGC

SEQ ID NO: 3001 - protein, 17 aa, Artificial Sequence
  Synthetically generated peptide
  VARIANT (1)..(17): Xaa = Any Amino Acid
CCXELCCXNPAXCTGXC

SEQ ID NO: 3002 - protein, 16 aa, Artificial Sequence
  Synthetically generated peptide
  VARIANT (1)..(16): Xaa = Any Amino Acid
CCXELCCXNPACXTGC

SEQ ID NO: 3003 - protein, 17 aa, Artificial Sequence
  Synthetically generated peptide
  VARIANT (1)..(17): Xaa = Any Amino Acid
CCXELCCXNPACXXTGC

SEQ ID NO: 3004 - protein, 17 aa, Artificial Sequence
  Synthetically generated peptide
  VARIANT (1)..(17): Xaa = Any Amino Acid
CCXELCCXNPACXTXGC

SEQ ID NO: 3005 - protein, 17 aa, Artificial Sequence
  Synthetically generated peptide
  VARIANT (1)..(17): Xaa = Any Amino Acid
CCXELCCXNPACXTGXC

SEQ ID NO: 3006 - protein, 16 aa, Artificial Sequence
  Synthetically generated peptide
  VARIANT (1)..(16): Xaa = Any Amino Acid
CCXELCCXNPACTXGC

SEQ ID NO: 3007 - protein, 17 aa, Artificial Sequence
  Synthetically generated peptide
  VARIANT (1)..(17): Xaa = Any Amino Acid
CCXELCCXNPACTXXGC

SEQ ID NO: 3008 - protein, 17 aa, Artificial Sequence
  Synthetically generated peptide
  VARIANT (1)..(17): Xaa = Any Amino Acid
CCXELCCXNPACTXGXC

SEQ ID NO: 3009 - protein, 16 aa, Artificial Sequence
  Synthetically generated peptide
  VARIANT (1)..(16): Xaa = Any Amino Acid
CCXELCCXNPACTGXC

SEQ ID NO: 3010 - protein, 17 aa, Artificial Sequence
  Synthetically generated peptide
  VARIANT (1)..(17): Xaa = Any Amino Acid
CCXELCCXNPACTGXXC

SEQ ID NO: 3011 - protein, 15 aa, Artificial Sequence
  Synthetically generated peptide
  VARIANT (1)..(15): Xaa = Any Amino Acid
CCXELCCNXPACTGC

SEQ ID NO: 3012 - protein, 16 aa, Artificial Sequence
  Synthetically generated peptide
  VARIANT (1)..(16): Xaa = Any Amino Acid
CCXELCCNXXPACTGC

SEQ ID NO: 3013 - protein, 17 aa, Artificial Sequence
  Synthetically generated peptide
  VARIANT (1)..(17): Xaa = Any Amino Acid
CCXELCCNXXXPACTGC

SEQ ID NO: 3014 - protein, 17 aa, Artificial Sequence
  Synthetically generated peptide
  VARIANT (1)..(17): Xaa = Any Amino Acid
CCXELCCNXXPXACTGC

SEQ ID NO: 3015 - protein, 17 aa, Artificial Sequence
  Synthetically generated peptide
  VARIANT (1)..(17): Xaa = Any Amino Acid
CCXELCCNXXPAXCTGC

SEQ ID NO: 3016 - protein, 17 aa, Artificial Sequence
  Synthetically generated peptide
  VARIANT (1)..(17): Xaa = Any Amino Acid
CCXELCCNXXPACXTGC

SEQ ID NO: 3017 - protein, 17 aa, Artificial Sequence
  Synthetically generated peptide
  VARIANT (1)..(17): Xaa = Any Amino Acid
CCXELCCNXXPACTXGC

SEQ ID NO: 3018 - protein, 17 aa, Artificial Sequence
  Synthetically generated peptide
  VARIANT (1)..(17): Xaa = Any Amino Acid
CCXELCCNXXPACTGXC

SEQ ID NO: 3019 - protein, 16 aa, Artificial Sequence
  Synthetically generated peptide
  VARIANT (1)..(16): Xaa = Any Amino Acid
CCXELCCNXPXACTGC

SEQ ID NO: 3020 - protein, 17 aa, Artificial Sequence
  Synthetically generated peptide
  VARIANT (1)..(17): Xaa = Any Amino Acid
CCXELCCNXPXXACTGC

SEQ ID NO: 3021 - protein, 17 aa, Artificial Sequence
  Synthetically generated peptide
  VARIANT (1)..(17): Xaa = Any Amino Acid
CCXELCCNXPXAXCTGC

SEQ ID NO: 3022 - protein, 17 aa, Artificial Sequence
  Synthetically generated peptide
  VARIANT (1)..(17): Xaa = Any Amino Acid
CCXELCCNXPXACXTGC

SEQ ID NO: 3023 - protein, 17 aa, Artificial Sequence
  Synthetically generated peptide
  VARIANT (1)..(17): Xaa = Any Amino Acid
CCXELCCNXPXACTXGC

SEQ ID NO: 3024 - protein, 17 aa, Artificial Sequence
  Synthetically generated peptide
  VARIANT (1)..(17): Xaa = Any Amino Acid
CCXELCCNXPXACTGXC

SEQ ID NO: 3025 - protein, 16 aa, Artificial Sequence
  Synthetically generated peptide
  VARIANT (1)..(16): Xaa = Any Amino Acid
CCXELCCNXPAXCTGC

SEQ ID NO: 3026 - protein, 17 aa, Artificial Sequence
  Synthetically generated peptide
  VARIANT (1)..(17): Xaa = Any Amino Acid
CCXELCCNXPAXXCTGC

SEQ ID NO: 3027 - protein, 17 aa, Artificial Sequence
  Synthetically generated peptide
  VARIANT (1)..(17): Xaa = Any Amino Acid
CCXELCCNXPAXCXTGC

SEQ ID NO: 3028 - protein, 17 aa, Artificial Sequence
  Synthetically generated peptide
  VARIANT (1)..(17): Xaa = Any Amino Acid
CCXELCCNXPAXCTXGC

SEQ ID NO: 3029 - protein, 17 aa, Artificial Sequence
  Synthetically generated peptide
  VARIANT (1)..(17): Xaa = Any Amino Acid
CCXELCCNXPAXCTGXC

SEQ ID NO: 3030 - protein, 16 aa, Artificial Sequence
  Synthetically generated peptide
  VARIANT (1)..(16): Xaa = Any Amino Acid
CCXELCCNXPACXTGC

SEQ ID NO: 3031 - protein, 17 aa, Artificial Sequence
  Synthetically generated peptide
  VARIANT (1)..(17): Xaa = Any Amino Acid
CCXELCCNXPACXXTGC

SEQ ID NO: 3032 - protein, 17 aa, Artificial Sequence
  Synthetically generated peptide
  VARIANT (1)..(17): Xaa = Any Amino Acid
CCXELCCNXPACXTXGC

SEQ ID NO: 3033 - protein, 17 aa, Artificial Sequence
  Synthetically generated peptide
  VARIANT (1)..(17): Xaa = Any Amino Acid
CCXELCCNXPACXTGXC

SEQ ID NO: 3034 - protein, 16 aa, Artificial Sequence
  Synthetically generated peptide
  VARIANT (1)..(16): Xaa = Any Amino Acid
CCXELCCNXPACTXGC

SEQ ID NO: 3035 - protein, 17 aa, Artificial Sequence
  Synthetically generated peptide
  VARIANT (1)..(17): Xaa = Any Amino Acid
CCXELCCNXPACTXXGC

SEQ ID NO: 3036 - protein, 17 aa, Artificial Sequence
  Synthetically generated peptide
  VARIANT (1)..(17): Xaa = Any Amino Acid
CCXELCCNXPACTXGXC

SEQ ID NO: 3037 - protein, 16 aa, Artificial Sequence
  Synthetically generated peptide
  VARIANT (1)..(16): Xaa = Any Amino Acid
CCXELCCNXPACTGXC

SEQ ID NO: 3038 - protein, 17 aa, Artificial Sequence
  Synthetically generated peptide
  VARIANT (1)..(17): Xaa = Any Amino Acid
CCXELCCNXPACTGXXC

SEQ ID NO: 3039 - protein, 15 aa, Artificial Sequence
  Synthetically generated peptide
  VARIANT (1)..(15): Xaa = Any Amino Acid
CCXELCCNPXACTGC

SEQ ID NO: 3040 - protein, 16 aa, Artificial Sequence
  Synthetically generated peptide
  VARIANT (1)..(16): Xaa = Any Amino Acid
CCXELCCNPXXACTGC

SEQ ID NO: 3041 - protein, 17 aa, Artificial Sequence
  Synthetically generated peptide
  VARIANT (1)..(17): Xaa = Any Amino Acid
CCXELCCNPXXXACTGC

SEQ ID NO: 3042 - protein, 17 aa, Artificial Sequence
  Synthetically generated peptide
  VARIANT (1)..(17): Xaa = Any Amino Acid
CCXELCCNPXXAXCTGC

SEQ ID NO: 3043 - protein, 17 aa, Artificial Sequence
  Synthetically generated peptide
  VARIANT (1)..(17): Xaa = Any Amino Acid
CCXELCCNPXXACXTGC

SEQ ID NO: 3044 - protein, 17 aa, Artificial Sequence
  Synthetically generated peptide
  VARIANT (1)..(17): Xaa = Any Amino Acid
CCXELCCNPXXACTXGC

SEQ ID NO: 3045 - protein, 17 aa, Artificial Sequence
  Synthetically generated peptide
  VARIANT (1)..(17): Xaa = Any Amino Acid
CCXELCCNPXXACTGXC

SEQ ID NO: 3046 - protein, 16 aa, Artificial Sequence
  Synthetically generated peptide
  VARIANT (1)..(16): Xaa = Any Amino Acid
CCXELCCNPXAXCTGC

SEQ ID NO: 3047 - protein, 17 aa, Artificial Sequence
  Synthetically generated peptide
  VARIANT (1)..(17): Xaa = Any Amino Acid
CCXELCCNPXAXXCTGC

SEQ ID NO: 3048 - protein, 17 aa, Artificial Sequence
  Synthetically generated peptide
  VARIANT (1)..(17): Xaa = Any Amino Acid
CCXELCCNPXAXCXTGC

SEQ ID NO: 3049 - protein, 17 aa, Artificial Sequence
  Synthetically generated peptide
  VARIANT (1)..(17): Xaa = Any Amino Acid
CCXELCCNPXAXCTXGC

SEQ ID NO: 3050 - protein, 17 aa, Artificial Sequence
  Synthetically generated peptide
  VARIANT (1)..(17): Xaa = Any Amino Acid
CCXELCCNPXAXCTGXC

SEQ ID NO: 3051 - protein, 16 aa, Artificial Sequence
  Synthetically generated peptide
  VARIANT (1)..(16): Xaa = Any Amino Acid
CCXELCCNPXACXTGC

SEQ ID NO: 3052 - protein, 17 aa, Artificial Sequence
  Synthetically generated peptide
  VARIANT (1)..(17): Xaa = Any Amino Acid
CCXELCCNPXACXXTGC

SEQ ID NO: 3053 - protein, 17 aa, Artificial Sequence
  Synthetically generated peptide
  VARIANT (1)..(17): Xaa = Any Amino Acid
CCXELCCNPXACXTXGC

SEQ ID NO: 3054 - protein, 17 aa, Artificial Sequence
  Synthetically generated peptide
  VARIANT (1)..(17): Xaa = Any Amino Acid
CCXELCCNPXACXTGXC

SEQ ID NO: 3055 - protein, 16 aa, Artificial Sequence
  Synthetically generated peptide
  VARIANT (1)..(16): Xaa = Any Amino Acid
CCXELCCNPXACTXGC

SEQ ID NO: 3056 - protein, 17 aa, Artificial Sequence
  Synthetically generated peptide
  VARIANT (1)..(17): Xaa = Any Amino Acid
CCXELCCNPXACTXXGC

SEQ ID NO: 3057 - protein, 17 aa, Artificial Sequence
  Synthetically generated peptide
  VARIANT (1)..(17): Xaa = Any Amino Acid
CCXELCCNPXACTXGXC

SEQ ID NO: 3058 - protein, 16 aa, Artificial Sequence
  Synthetically generated peptide
  VARIANT (1)..(16): Xaa = Any Amino Acid
CCXELCCNPXACTGXC

SEQ ID NO: 3059 - protein, 17 aa, Artificial Sequence
  Synthetically generated peptide
  VARIANT (1)..(17): Xaa = Any Amino Acid
CCXELCCNPXACTGXXC

SEQ ID NO: 3060 - protein, 15 aa, Artificial Sequence
  Synthetically generated peptide
  VARIANT (1)..(15): Xaa = Any Amino Acid
CCXELCCNPAXCTGC

SEQ ID NO: 3061 - protein, 16 aa, Artificial Sequence
  Synthetically generated peptide
  VARIANT (1)..(16): Xaa = Any Amino Acid
CCXELCCNPAXXCTGC

SEQ ID NO: 3062 - protein, 17 aa, Artificial Sequence
  Synthetically generated peptide
  VARIANT (1)..(17): Xaa = Any Amino Acid
CCXELCCNPAXXXCTGC

SEQ ID NO: 3063 - protein, 17 aa, Artificial Sequence
  Synthetically generated peptide
  VARIANT (1)..(17): Xaa = Any Amino Acid
CCXELCCNPAXXCXTGC

SEQ ID NO: 3064 - protein, 17 aa, Artificial Sequence
  Synthetically generated peptide
  VARIANT (1)..(17): Xaa = Any Amino Acid
CCXELCCNPAXXCTXGC

SEQ ID NO: 3065 - protein, 17 aa, Artificial Sequence
  Synthetically generated peptide
  VARIANT (1)..(17): Xaa = Any Amino Acid
CCXELCCNPAXXCTGXC

SEQ ID NO: 3066 - protein, 16 aa, Artificial Sequence
  Synthetically generated peptide
  VARIANT (1)..(16): Xaa = Any Amino Acid
CCXELCCNPAXCXTGC

SEQ ID NO: 3067 - protein, 17 aa, Artificial Sequence
  Synthetically generated peptide
  VARIANT (1)..(17): Xaa = Any Amino Acid
CCXELCCNPAXCXXTGC

SEQ ID NO: 3068 - protein, 17 aa, Artificial Sequence
  Synthetically generated peptide
  VARIANT (1)..(17): Xaa = Any Amino Acid
CCXELCCNPAXCXTXGC

SEQ ID NO: 3069 - protein, 17 aa, Artificial Sequence
  Synthetically generated peptide
  VARIANT (1)..(17): Xaa = Any Amino Acid
CCXELCCNPAXCXTGXC

SEQ ID NO: 3070 - protein, 16 aa, Artificial Sequence
  Synthetically generated peptide
  VARIANT (1)..(16): Xaa = Any Amino Acid
CCXELCCNPAXCTXGC

SEQ ID NO: 3071 - protein, 17 aa, Artificial Sequence
  Synthetically generated peptide
  VARIANT (1)..(17): Xaa = Any Amino Acid
CCXELCCNPAXCTXXGC

SEQ ID NO: 3072 - protein, 17 aa, Artificial Sequence
  Synthetically generated peptide
  VARIANT (1)..(17): Xaa = Any Amino Acid
CCXELCCNPAXCTXGXC

SEQ ID NO: 3073 - protein, 16 aa, Artificial Sequence
  Synthetically generated peptide
  VARIANT (1)..(16): Xaa = Any Amino Acid
CCXELCCNPAXCTGXC

SEQ ID NO: 3074 - protein, 17 aa, Artificial Sequence
  Synthetically generated peptide
  VARIANT (1)..(17): Xaa = Any Amino Acid
CCXELCCNPAXCTGXXC

SEQ ID NO: 3075 - protein, 15 aa, Artificial Sequence
  Synthetically generated peptide
  VARIANT (1)..(15): Xaa = Any Amino Acid
CCXELCCNPACXTGC

SEQ ID NO: 3076 - protein, 16 aa, Artificial Sequence
  Synthetically generated peptide
  VARIANT (1)..(16): Xaa = Any Amino Acid
CCXELCCNPACXXTGC

SEQ ID NO: 3077 - protein, 17 aa, Artificial Sequence
  Synthetically generated peptide
  VARIANT (1)..(17): Xaa = Any Amino Acid
CCXELCCNPACXXXTGC

SEQ ID NO: 3078 - protein, 17 aa, Artificial Sequence
  Synthetically generated peptide
  VARIANT (1)..(17): Xaa = Any Amino Acid
CCXELCCNPACXXTXGC

SEQ ID NO: 3079 - protein, 17 aa, Artificial Sequence
  Synthetically generated peptide
  VARIANT (1)..(17): Xaa = Any Amino Acid
CCXELCCNPACXXTGXC

SEQ ID NO: 3080 - protein, 16 aa, Artificial Sequence
  Synthetically generated peptide
  VARIANT (1)..(16): Xaa = Any Amino Acid
CCXELCCNPACXTXGC

SEQ ID NO: 3081 - protein, 17 aa, Artificial Sequence
  Synthetically generated peptide
  VARIANT (1)..(17): Xaa = Any Amino Acid
CCXELCCNPACXTXXGC

SEQ ID NO: 3082 - protein, 17 aa, Artificial Sequence
  Synthetically generated peptide
  VARIANT (1)..(17): Xaa = Any Amino Acid
CCXELCCNPACXTXGXC

SEQ ID NO: 3083 - protein, 16 aa, Artificial Sequence
  Synthetically generated peptide
  VARIANT (1)..(16): Xaa = Any Amino Acid
CCXELCCNPACXTGXC

SEQ ID NO: 3084 - protein, 17 aa, Artificial Sequence
  Synthetically generated peptide
  VARIANT (1)..(17): Xaa = Any Amino Acid
CCXELCCNPACXTGXXC

SEQ ID NO: 3085 - protein, 15 aa, Artificial Sequence
  Synthetically generated peptide
  VARIANT (1)..(15): Xaa = Any Amino Acid
CCXELCCNPACTXGC

SEQ ID NO: 3086 - protein, 16 aa, Artificial Sequence
  Synthetically generated peptide
  VARIANT (1)..(16): Xaa = Any Amino Acid
CCXELCCNPACTXXGC

SEQ ID NO: 3087 - protein, 17 aa, Artificial Sequence
  Synthetically generated peptide
  VARIANT (1)..(17): Xaa = Any Amino Acid
CCXELCCNPACTXXXGC

SEQ ID NO: 3088 - protein, 17 aa, Artificial Sequence
  Synthetically generated peptide
  VARIANT (1)..(17): Xaa = Any Amino Acid
CCXELCCNPACTXXGXC

SEQ ID NO: 3089 - protein, 16 aa, Artificial Sequence
  Synthetically generated peptide
  VARIANT (1)..(16): Xaa = Any Amino Acid
CCXELCCNPACTXGXC

SEQ ID NO: 3090 - protein, 17 aa, Artificial Sequence
  Synthetically generated peptide
  VARIANT (1)..(17): Xaa = Any Amino Acid
CCXELCCNPACTXGXXC

SEQ ID NO: 3091 - protein, 15 aa, Artificial Sequence
  Synthetically generated peptide
  VARIANT (1)..(15): Xaa = Any Amino Acid
CCXELCCNPACTGXC

SEQ ID NO: 3092 - protein, 16 aa, Artificial Sequence
  Synthetically generated peptide
  VARIANT (1)..(16): Xaa = Any Amino Acid
CCXELCCNPACTGXXC

SEQ ID NO: 3093 - protein, 17 aa, Artificial Sequence
  Synthetically generated peptide
  VARIANT (1)..(17): Xaa = Any Amino Acid
CCXELCCNPACTGXXXC

SEQ ID NO: 3094 - protein, 14 aa, Artificial Sequence
  Synthetically generated peptide
  VARIANT (1)..(14): Xaa = Any Amino Acid
CCEXLCCNPACTGC

SEQ ID NO: 3095 - protein, 15 aa, Artificial Sequence
  Synthetically generated peptide
  VARIANT (1)..(15): Xaa = Any Amino Acid
CCEXXLCCNPACTGC

SEQ ID NO: 3096 - protein, 16 aa, Artificial Sequence
  Synthetically generated peptide
  VARIANT (1)..(16): Xaa = Any Amino Acid
CCEXXXLCCNPACTGC

SEQ ID NO: 3097 - protein, 17 aa, Artificial Sequence
  Synthetically generated peptide
  VARIANT (1)..(17): Xaa = Any Amino Acid
CCEXXXXLCCNPACTGC

SEQ ID NO: 3098 - protein, 17 aa, Artificial Sequence
  Synthetically generated peptide
  VARIANT (1)..(17): Xaa = Any Amino Acid
CCEXXXLXCCNPACTGC

SEQ ID NO: 3099 - protein, 17 aa, Artificial Sequence
  Synthetically generated peptide
  VARIANT (1)..(17): Xaa = Any Amino Acid
CCEXXXLCCXNPACTGC

SEQ ID NO: 3100 - protein, 17 aa, Artificial Sequence
  Synthetically generated peptide
  VARIANT (1)..(17): Xaa = Any Amino Acid
CCEXXXLCCNXPACTGC

SEQ ID NO: 3101 - protein, 17 aa, Artificial Sequence
  Synthetically generated peptide
  VARIANT (1)..(17): Xaa = Any Amino Acid
CCEXXXLCCNPXACTGC

SEQ ID NO: 3102 - protein, 17 aa, Artificial Sequence
  Synthetically generated peptide
  VARIANT (1)..(17): Xaa = Any Amino Acid
CCEXXXLCCNPAXCTGC

SEQ ID NO: 3103 - protein, 17 aa, Artificial Sequence
  Synthetically generated peptide
  VARIANT (1)..(17): Xaa = Any Amino Acid
CCEXXXLCCNPACXTGC

SEQ ID NO: 3104 - protein, 17 aa, Artificial Sequence
  Synthetically generated peptide
  VARIANT (1)..(17): Xaa = Any Amino Acid
CCEXXXLCCNPACTXGC

SEQ ID NO: 3105 - protein, 17 aa, Artificial Sequence
  Synthetically generated peptide
  VARIANT (1)..(17): Xaa = Any Amino Acid
CCEXXXLCCNPACTGXC

SEQ ID NO: 3106 - protein, 16 aa, Artificial Sequence
  Synthetically generated peptide
  VARIANT (1)..(16): Xaa = Any Amino Acid
CCEXXLXCCNPACTGC

SEQ ID NO: 3107 - protein, 17 aa, Artificial Sequence
  Synthetically generated peptide
  VARIANT (1)..(17): Xaa = Any Amino Acid
CCEXXLXXCCNPACTGC

SEQ ID NO: 3108 - protein, 17 aa, Artificial Sequence
  Synthetically generated peptide
  VARIANT (1)..(17): Xaa = Any Amino Acid
CCEXXLXCCXNPACTGC

SEQ ID NO: 3109 - protein, 17 aa, Artificial Sequence
  Synthetically generated peptide
  VARIANT (1)..(17): Xaa = Any Amino Acid
CCEXXLXCCNXPACTGC

SEQ ID NO: 3110 - protein, 17 aa, Artificial Sequence
  Synthetically generated peptide
  VARIANT (1)..(17): Xaa = Any Amino Acid
CCEXXLXCCNPXACTGC

SEQ ID NO: 3111 - protein, 17 aa, Artificial Sequence
  Synthetically generated peptide
  VARIANT (1)..(17): Xaa = Any Amino Acid
CCEXXLXCCNPAXCTGC

SEQ ID NO: 3112 - protein, 17 aa, Artificial Sequence
  Synthetically generated peptide
  VARIANT (1)..(17): Xaa = Any Amino Acid
CCEXXLXCCNPACXTGC

SEQ ID NO: 3113 - protein, 17 aa, Artificial Sequence
  Synthetically generated peptide
  VARIANT (1)..(17): Xaa = Any Amino Acid
CCEXXLXCCNPACTXGC

SEQ ID NO: 3114 - protein, 17 aa, Artificial Sequence
  Synthetically generated peptide
  VARIANT (1)..(17): Xaa = Any Amino Acid
CCEXXLXCCNPACTGXC

SEQ ID NO: 3115 - protein, 16 aa, Artificial Sequence
  Synthetically generated peptide
  VARIANT (1)..(16): Xaa = Any Amino Acid
CCEXXLCCXNPACTGC

SEQ ID NO: 3116 - protein, 17 aa, Artificial Sequence
  Synthetically generated peptide
  VARIANT (1)..(17): Xaa = Any Amino Acid
CCEXXLCCXXNPACTGC

SEQ ID NO: 3117 - protein, 17 aa, Artificial Sequence
  Synthetically generated peptide
  VARIANT (1)..(17): Xaa = Any Amino Acid
CCEXXLCCXNXPACTGC

SEQ ID NO: 3118 - protein, 17 aa, Artificial Sequence
  Synthetically generated peptide
  VARIANT (1)..(17): Xaa = Any Amino Acid
CCEXXLCCXNPXACTGC

SEQ ID NO: 3119 - protein, 17 aa, Artificial Sequence
  Synthetically generated peptide
  VARIANT (1)..(17): Xaa = Any Amino Acid
CCEXXLCCXNPAXCTGC

SEQ ID NO: 3120 - protein, 17 aa, Artificial Sequence
  Synthetically generated peptide
  VARIANT (1)..(17): Xaa = Any Amino Acid
CCEXXLCCXNPACXTGC

SEQ ID NO: 3121 - protein, 17 aa, Artificial Sequence
  Synthetically generated peptide
  VARIANT (1)..(17): Xaa = Any Amino Acid
CCEXXLCCXNPACTXGC

SEQ ID NO: 3122 - protein, 17 aa, Artificial Sequence
  Synthetically generated peptide
  VARIANT (1)..(17): Xaa = Any Amino Acid
CCEXXLCCXNPACTGXC

SEQ ID NO: 3123 - protein, 16 aa, Artificial Sequence
  Synthetically generated peptide
  VARIANT (1)..(16): Xaa = Any Amino Acid
CCEXXLCCNXPACTGC

SEQ ID NO: 3124 - protein, 17 aa, Artificial Sequence
  Synthetically generated peptide
  VARIANT (1)..(17): Xaa = Any Amino Acid
CCEXXLCCNXXPACTGC

SEQ ID NO: 3125 - protein, 17 aa, Artificial Sequence
  Synthetically generated peptide
  VARIANT (1)..(17): Xaa = Any Amino Acid
CCEXXLCCNXPXACTGC

SEQ ID NO: 3126 - protein, 17 aa, Artificial Sequence
  Synthetically generated peptide
  VARIANT (1)..(17): Xaa = Any Amino Acid
CCEXXLCCNXPAXCTGC

SEQ ID NO: 3127 - protein, 17 aa, Artificial Sequence
  Synthetically generated peptide
  VARIANT (1)..(17): Xaa = Any Amino Acid
CCEXXLCCNXPACXTGC

SEQ ID NO: 3128 - protein, 17 aa, Artificial Sequence
  Synthetically generated peptide
  VARIANT (1)..(17): Xaa = Any Amino Acid
CCEXXLCCNXPACTXGC

SEQ ID NO: 3129 - protein, 17 aa, Artificial Sequence
  Synthetically generated peptide
  VARIANT (1)..(17): Xaa = Any Amino Acid
CCEXXLCCNXPACTGXC

SEQ ID NO: 3130 - protein, 16 aa, Artificial Sequence
  Synthetically generated peptide
  VARIANT (1)..(16): Xaa = Any Amino Acid
CCEXXLCCNPXACTGC

SEQ ID NO: 3131 - protein, 17 aa, Artificial Sequence
  Synthetically generated peptide
  VARIANT (1)..(17): Xaa = Any Amino Acid
CCEXXLCCNPXXACTGC

SEQ ID NO: 3132 - protein, 17 aa, Artificial Sequence
  Synthetically generated peptide
  VARIANT (1)..(17): Xaa = Any Amino Acid
CCEXXLCCNPXAXCTGC

SEQ ID NO: 3133 - protein, 17 aa, Artificial Sequence
  Synthetically generated peptide
  VARIANT (1)..(17): Xaa = Any Amino Acid
CCEXXLCCNPXACXTGC

SEQ ID NO: 3134 - protein, 17 aa, Artificial Sequence
  Synthetically generated peptide
  VARIANT (1)..(17): Xaa = Any Amino Acid
CCEXXLCCNPXACTXGC

SEQ ID NO: 3135 - protein, 17 aa, Artificial Sequence
  Synthetically generated peptide
  VARIANT (1)..(17): Xaa = Any Amino Acid
CCEXXLCCNPXACTGXC

SEQ ID NO: 3136 - protein, 16 aa, Artificial Sequence
  Synthetically generated peptide
  VARIANT (1)..(16): Xaa = Any Amino Acid
CCEXXLCCNPAXCTGC

SEQ ID NO: 3137 - protein, 17 aa, Artificial Sequence
  Synthetically generated peptide
  VARIANT (1)..(17): Xaa = Any Amino Acid
CCEXXLCCNPAXXCTGC

SEQ ID NO: 3138 - protein, 17 aa, Artificial Sequence
  Synthetically generated peptide
  VARIANT (1)..(17): Xaa = Any Amino Acid
CCEXXLCCNPAXCXTGC

SEQ ID NO: 3139 - protein, 17 aa, Artificial Sequence
  Synthetically generated peptide
  VARIANT (1)..(17): Xaa = Any Amino Acid
CCEXXLCCNPAXCTXGC

SEQ ID NO: 3140 - protein, 17 aa, Artificial Sequence
  Synthetically generated peptide
  VARIANT (1)..(17): Xaa = Any Amino Acid
CCEXXLCCNPAXCTGXC

SEQ ID NO: 3141 - protein, 16 aa, Artificial Sequence
  Synthetically generated peptide
  VARIANT (1)..(16): Xaa = Any Amino Acid
CCEXXLCCNPACXTGC

SEQ ID NO: 3142 - protein, 17 aa, Artificial Sequence
  Synthetically generated peptide
  VARIANT (1)..(17): Xaa = Any Amino Acid
CCEXXLCCNPACXXTGC

SEQ ID NO: 3143 - protein, 17 aa, Artificial Sequence
  Synthetically generated peptide
  VARIANT (1)..(17): Xaa = Any Amino Acid
CCEXXLCCNPACXTXGC

SEQ ID NO: 3144 - protein, 17 aa, Artificial Sequence
  Synthetically generated peptide
  VARIANT (1)..(17): Xaa = Any Amino Acid
CCEXXLCCNPACXTGXC

SEQ ID NO: 3145 - protein, 16 aa, Artificial Sequence
  Synthetically generated peptide
  VARIANT (1)..(16): Xaa = Any Amino Acid
CCEXXLCCNPACTXGC

SEQ ID NO: 3146 - protein, 17 aa, Artificial Sequence
  Synthetically generated peptide
  VARIANT (1)..(17): Xaa = Any Amino Acid
CCEXXLCCNPACTXXGC

SEQ ID NO: 3147 - protein, 17 aa, Artificial Sequence
  Synthetically generated peptide
  VARIANT (1)..(17): Xaa = Any Amino Acid
CCEXXLCCNPACTXGXC

SEQ ID NO: 3148 - protein, 16 aa, Artificial Sequence
  Synthetically generated peptide
  VARIANT (1)..(16): Xaa = Any Amino Acid
CCEXXLCCNPACTGXC

SEQ ID NO: 3149 - protein, 17 aa, Artificial Sequence
  Synthetically generated peptide
  VARIANT (1)..(17): Xaa = Any Amino Acid
CCEXXLCCNPACTGXXC

SEQ ID NO: 3150 - protein, 15 aa, Artificial Sequence
  Synthetically generated peptide
  VARIANT (1)..(15): Xaa = Any Amino Acid
CCEXLXCCNPACTGC

SEQ ID NO: 3151 - protein, 16 aa, Artificial Sequence
  Synthetically generated peptide
  VARIANT (1)..(16): Xaa = Any Amino Acid
CCEXLXXCCNPACTGC

SEQ ID NO: 3152 - protein, 17 aa, Artificial Sequence
  Synthetically generated peptide
  VARIANT (1)..(17): Xaa = Any Amino Acid
CCEXLXXXCCNPACTGC

SEQ ID NO: 3153 - protein, 17 aa, Artificial Sequence
  Synthetically generated peptide
  VARIANT (1)..(17): Xaa = Any Amino Acid
CCEXLXXCCXNPACTGC

SEQ ID NO: 3154 - protein, 17 aa, Artificial Sequence
  Synthetically generated peptide
  VARIANT (1)..(17): Xaa = Any Amino Acid
CCEXLXXCCNXPACTGC

SEQ ID NO: 3155 - protein, 17 aa, Artificial Sequence
  Synthetically generated peptide
  VARIANT (1)..(17): Xaa = Any Amino Acid
CCEXLXXCCNPXACTGC

SEQ ID NO: 3156 - protein, 17 aa, Artificial Sequence
  Synthetically generated peptide
  VARIANT (1)..(17): Xaa = Any Amino Acid
CCEXLXXCCNPAXCTGC

SEQ ID NO: 3157 - protein, 17 aa, Artificial Sequence
  Synthetically generated peptide
  VARIANT (1)..(17): Xaa = Any Amino Acid
CCEXLXXCCNPACXTGC

SEQ ID NO: 3158 - protein, 17 aa, Artificial Sequence
  Synthetically generated peptide
  VARIANT (1)..(17): Xaa = Any Amino Acid
CCEXLXXCCNPACTXGC

SEQ ID NO: 3159 - protein, 17 aa, Artificial Sequence
  Synthetically generated peptide
  VARIANT (1)..(17): Xaa = Any Amino Acid
CCEXLXXCCNPACTGXC

SEQ ID NO: 3160 - protein, 16 aa, Artificial Sequence
  Synthetically generated peptide
  VARIANT (1)..(16): Xaa = Any Amino Acid
CCEXLXCCXNPACTGC

SEQ ID NO: 3161 - protein, 17 aa, Artificial Sequence
  Synthetically generated peptide
  VARIANT (1)..(17): Xaa = Any Amino Acid
CCEXLXCCXXNPACTGC

SEQ ID NO: 3162 - protein, 17 aa, Artificial Sequence
  Synthetically generated peptide
  VARIANT (1)..(17): Xaa = Any Amino Acid
CCEXLXCCXNXPACTGC

SEQ ID NO: 3163 - protein, 17 aa, Artificial Sequence
  Synthetically generated peptide
  VARIANT (1)..(17): Xaa = Any Amino Acid
CCEXLXCCXNPXACTGC

SEQ ID NO: 3164 - protein, 17 aa, Artificial Sequence
  Synthetically generated peptide
  VARIANT (1)..(17): Xaa = Any Amino Acid
CCEXLXCCXNPAXCTGC

SEQ ID NO: 3165 - protein, 17 aa, Artificial Sequence
  Synthetically generated peptide
  VARIANT (1)..(17): Xaa = Any Amino Acid
CCEXLXCCXNPACXTGC

SEQ ID NO: 3166 - protein, 17 aa, Artificial Sequence
  Synthetically generated peptide
  VARIANT (1)..(17): Xaa = Any Amino Acid
CCEXLXCCXNPACTXGC

SEQ ID NO: 3167 - protein, 17 aa, Artificial Sequence
  Synthetically generated peptide
  VARIANT (1)..(17): Xaa = Any Amino Acid
CCEXLXCCXNPACTGXC

SEQ ID NO: 3168 - protein, 16 aa, Artificial Sequence
  Synthetically generated peptide
  VARIANT (1)..(16): Xaa = Any Amino Acid
CCEXLXCCNXPACTGC

SEQ ID NO: 3169 - protein, 17 aa, Artificial Sequence
  Synthetically generated peptide
  VARIANT (1)..(17): Xaa = Any Amino Acid
CCEXLXCCNXXPACTGC

SEQ ID NO: 3170 - protein, 17 aa, Artificial Sequence
  Synthetically generated peptide
  VARIANT (1)..(17): Xaa = Any Amino Acid
CCEXLXCCNXPXACTGC

SEQ ID NO: 3171 - protein, 17 aa, Artificial Sequence
  Synthetically generated peptide
  VARIANT (1)..(17): Xaa = Any Amino Acid
CCEXLXCCNXPAXCTGC

SEQ ID NO: 3172 - protein, 17 aa, Artificial Sequence
  Synthetically generated peptide
  VARIANT (1)..(17): Xaa = Any Amino Acid
CCEXLXCCNXPACXTGC

SEQ ID NO: 3173 - protein, 17 aa, Artificial Sequence
  Synthetically generated peptide
  VARIANT (1)..(17): Xaa = Any Amino Acid
CCEXLXCCNXPACTXGC

SEQ ID NO: 3174 - protein, 17 aa, Artificial Sequence
  Synthetically generated peptide
  VARIANT (1)..(17): Xaa = Any Amino Acid
CCEXLXCCNXPACTGXC

SEQ ID NO: 3175 - protein, 16 aa, Artificial Sequence
  Synthetically generated peptide
  VARIANT (1)..(16): Xaa = Any Amino Acid
CCEXLXCCNPXACTGC

SEQ ID NO: 3176 - protein, 17 aa, Artificial Sequence
  Synthetically generated peptide
  VARIANT (1)..(17): Xaa = Any Amino Acid
CCEXLXCCNPXXACTGC

SEQ ID NO: 3177 - protein, 17 aa, Artificial Sequence
  Synthetically generated peptide
  VARIANT (1)..(17): Xaa = Any Amino Acid
CCEXLXCCNPXAXCTGC

SEQ ID NO: 3178 - protein, 17 aa, Artificial Sequence
  Synthetically generated peptide
  VARIANT (1)..(17): Xaa = Any Amino Acid
CCEXLXCCNPXACXTGC

SEQ ID NO: 3179 - protein, 17 aa, Artificial Sequence
  Synthetically generated peptide
  VARIANT (1)..(17): Xaa = Any Amino Acid
CCEXLXCCNPXACTXGC

SEQ ID NO: 3180 - protein, 17 aa, Artificial Sequence
  Synthetically generated peptide
  VARIANT (1)..(17): Xaa = Any Amino Acid
CCEXLXCCNPXACTGXC

SEQ ID NO: 3181 - protein, 16 aa, Artificial Sequence
  Synthetically generated peptide
  VARIANT (1)..(16): Xaa = Any Amino Acid
CCEXLXCCNPAXCTGC

SEQ ID NO: 3182 - protein, 17 aa, Artificial Sequence
  Synthetically generated peptide
  VARIANT (1)..(17): Xaa = Any Amino Acid
CCEXLXCCNPAXXCTGC

SEQ ID NO: 3183 - protein, 17 aa, Artificial Sequence
  Synthetically generated peptide
  VARIANT (1)..(17): Xaa = Any Amino Acid
CCEXLXCCNPAXCXTGC

SEQ ID NO: 3184 - protein, 17 aa, Artificial Sequence
  Synthetically generated peptide
  VARIANT (1)..(17): Xaa = Any Amino Acid
CCEXLXCCNPAXCTXGC

SEQ ID NO: 3185 - protein, 17 aa, Artificial Sequence
  Synthetically generated peptide
  VARIANT (1)..(17): Xaa = Any Amino Acid
CCEXLXCCNPAXCTGXC

SEQ ID NO: 3186 - protein, 16 aa, Artificial Sequence
  Synthetically generated peptide
  VARIANT (1)..(16): Xaa = Any Amino Acid
CCEXLXCCNPACXTGC

SEQ ID NO: 3187 - protein, 17 aa, Artificial Sequence
  Synthetically generated peptide
  VARIANT (1)..(17): Xaa = Any Amino Acid
CCEXLXCCNPACXXTGC

SEQ ID NO: 3188 - protein, 17 aa, Artificial Sequence
  Synthetically generated peptide
  VARIANT (1)..(17): Xaa = Any Amino Acid
CCEXLXCCNPACXTXGC

SEQ ID NO: 3189 - protein, 17 aa, Artificial Sequence
  Synthetically generated peptide
  VARIANT (1)..(17): Xaa = Any Amino Acid
CCEXLXCCNPACXTGXC

SEQ ID NO: 3190 - protein, 16 aa, Artificial Sequence
  Synthetically generated peptide
  VARIANT (1)..(16): Xaa = Any Amino Acid
CCEXLXCCNPACTXGC

SEQ ID NO: 3191 - protein, 17 aa, Artificial Sequence
  Synthetically generated peptide
  VARIANT (1)..(17): Xaa = Any Amino Acid
CCEXLXCCNPACTXXGC

SEQ ID NO: 3192 - protein, 17 aa, Artificial Sequence
  Synthetically generated peptide
  VARIANT (1)..(17): Xaa = Any Amino Acid
CCEXLXCCNPACTXGXC

SEQ ID NO: 3193 - protein, 16 aa, Artificial Sequence
  Synthetically generated peptide
  VARIANT (1)..(16): Xaa = Any Amino Acid
CCEXLXCCNPACTGXC

SEQ ID NO: 3194 - protein, 17 aa, Artificial Sequence
  Synthetically generated peptide
  VARIANT (1)..(17): Xaa = Any Amino Acid
CCEXLXCCNPACTGXXC

SEQ ID NO: 3195 - protein, 15 aa, Artificial Sequence
  Synthetically generated peptide
  VARIANT (1)..(15): Xaa = Any Amino Acid
CCEXLCCXNPACTGC

SEQ ID NO: 3196 - protein, 16 aa, Artificial Sequence
  Synthetically generated peptide
  VARIANT (1)..(16): Xaa = Any Amino Acid
CCEXLCCXXNPACTGC

SEQ ID NO: 3197 - protein, 17 aa, Artificial Sequence
  Synthetically generated peptide
  VARIANT (1)..(17): Xaa = Any Amino Acid
CCEXLCCXXXNPACTGC

SEQ ID NO: 3198 - protein, 17 aa, Artificial Sequence
  Synthetically generated peptide
  VARIANT (1)..(17): Xaa = Any Amino Acid
CCEXLCCXXNXPACTGC

SEQ ID NO: 3199 - protein, 17 aa, Artificial Sequence
  Synthetically generated peptide
  VARIANT (1)..(17): Xaa = Any Amino Acid
CCEXLCCXXNPXACTGC

SEQ ID NO: 3200 - protein, 17 aa, Artificial Sequence
  Synthetically generated peptide
  VARIANT (1)..(17): Xaa = Any Amino Acid
CCEXLCCXXNPAXCTGC

SEQ ID NO: 3201 - protein, 17 aa, Artificial Sequence
  Synthetically generated peptide
  VARIANT (1)..(17): Xaa = Any Amino Acid
CCEXLCCXXNPACXTGC

SEQ ID NO: 3202 - protein, 17 aa, Artificial Sequence
  Synthetically generated peptide
  VARIANT (1)..(17): Xaa = Any Amino Acid
CCEXLCCXXNPACTXGC

SEQ ID NO: 3203 - protein, 17 aa, Artificial Sequence
  Synthetically generated peptide
  VARIANT (1)..(17): Xaa = Any Amino Acid
CCEXLCCXXNPACTGXC

SEQ ID NO: 3204 - protein, 16 aa, Artificial Sequence
  Synthetically generated peptide
  VARIANT (1)..(16): Xaa = Any Amino Acid
CCEXLCCXNXPACTGC

SEQ ID NO: 3205 - protein, 17 aa, Artificial Sequence
  Synthetically generated peptide
  VARIANT (1)..(17): Xaa = Any Amino Acid
CCEXLCCXNXXPACTGC

SEQ ID NO: 3206 - protein, 17 aa, Artificial Sequence
  Synthetically generated peptide
  VARIANT (1)..(17): Xaa = Any Amino Acid
CCEXLCCXNXPXACTGC

SEQ ID NO: 3207 - protein, 17 aa, Artificial Sequence
  Synthetically generated peptide
  VARIANT (1)..(17): Xaa = Any Amino Acid
CCEXLCCXNXPAXCTGC

SEQ ID NO: 3208 - protein, 17 aa, Artificial Sequence
  Synthetically generated peptide
  VARIANT (1)..(17): Xaa = Any Amino Acid
CCEXLCCXNXPACXTGC

SEQ ID NO: 3209 - protein, 17 aa, Artificial Sequence
  Synthetically generated peptide
  VARIANT (1)..(17): Xaa = Any Amino Acid
CCEXLCCXNXPACTXGC

SEQ ID NO: 3210 - protein, 17 aa, Artificial Sequence
  Synthetically generated peptide
  VARIANT (1)..(17): Xaa = Any Amino Acid
CCEXLCCXNXPACTGXC

SEQ ID NO: 3211 - protein, 16 aa, Artificial Sequence
  Synthetically generated peptide
  VARIANT (1)..(16): Xaa = Any Amino Acid
CCEXLCCXNPXACTGC

SEQ ID NO: 3212 - protein, 17 aa, Artificial Sequence
  Synthetically generated peptide
  VARIANT (1)..(17): Xaa = Any Amino Acid
CCEXLCCXNPXXACTGC

SEQ ID NO: 3213 - protein, 17 aa, Artificial Sequence
  Synthetically generated peptide
  VARIANT (1)..(17): Xaa = Any Amino Acid
CCEXLCCXNPXAXCTGC

SEQ ID NO: 3214 - protein, 17 aa, Artificial Sequence
  Synthetically generated peptide
  VARIANT (1)..(17): Xaa = Any Amino Acid
CCEXLCCXNPXACXTGC

SEQ ID NO: 3215 - protein, 17 aa, Artificial Sequence
  Synthetically generated peptide
  VARIANT (1)..(17): Xaa = Any Amino Acid
CCEXLCCXNPXACTXGC

SEQ ID NO: 3216 - protein, 17 aa, Artificial Sequence
  Synthetically generated peptide
  VARIANT (1)..(17): Xaa = Any Amino Acid
CCEXLCCXNPXACTGXC

SEQ ID NO: 3217 - protein, 16 aa, Artificial Sequence
  Synthetically generated peptide
  VARIANT (1)..(16): Xaa = Any Amino Acid
CCEXLCCXNPAXCTGC

SEQ ID NO: 3218 - protein, 17 aa, Artificial Sequence
  Synthetically generated peptide
  VARIANT (1)..(17): Xaa = Any Amino Acid
CCEXLCCXNPAXXCTGC

SEQ ID NO: 3219 - protein, 17 aa, Artificial Sequence
  Synthetically generated peptide
  VARIANT (1)..(17): Xaa = Any Amino Acid
CCEXLCCXNPAXCXTGC

SEQ ID NO: 3220 - protein, 17 aa, Artificial Sequence
  Synthetically generated peptide
  VARIANT (1)..(17): Xaa = Any Amino Acid
CCEXLCCXNPAXCTXGC

SEQ ID NO: 3221 - protein, 17 aa, Artificial Sequence
  Synthetically generated peptide
  VARIANT (1)..(17): Xaa = Any Amino Acid
CCEXLCCXNPAXCTGXC

SEQ ID NO: 3222 - protein, 16 aa, Artificial Sequence
  Synthetically generated peptide
  VARIANT (1)..(16): Xaa = Any Amino Acid
CCEXLCCXNPACXTGC

SEQ ID NO: 3223 - protein, 17 aa, Artificial Sequence
  Synthetically generated peptide
  VARIANT (1)..(17): Xaa = Any Amino Acid
CCEXLCCXNPACXXTGC

SEQ ID NO: 3224 - protein, 17 aa, Artificial Sequence
  Synthetically generated peptide
  VARIANT (1)..(17): Xaa = Any Amino Acid
CCEXLCCXNPACXTXGC

SEQ ID NO: 3225 - protein, 17 aa, Artificial Sequence
  Synthetically generated peptide
  VARIANT (1)..(17): Xaa = Any Amino Acid
CCEXLCCXNPACXTGXC

SEQ ID NO: 3226 - protein, 16 aa, Artificial Sequence
  Synthetically generated peptide
  VARIANT (1)..(16): Xaa = Any Amino Acid
CCEXLCCXNPACTXGC

SEQ ID NO: 3227 - protein, 17 aa, Artificial Sequence
  Synthetically generated peptide
  VARIANT (1)..(17): Xaa = Any Amino Acid
CCEXLCCXNPACTXXGC

SEQ ID NO: 3228 - protein, 17 aa, Artificial Sequence
  Synthetically generated peptide
  VARIANT (1)..(17): Xaa = Any Amino Acid
CCEXLCCXNPACTXGXC

SEQ ID NO: 3229 - protein, 16 aa, Artificial Sequence
  Synthetically generated peptide
  VARIANT (1)..(16): Xaa = Any Amino Acid
CCEXLCCXNPACTGXC

SEQ ID NO: 3230 - protein, 17 aa, Artificial Sequence
  Synthetically generated peptide
  VARIANT (1)..(17): Xaa = Any Amino Acid
CCEXLCCXNPACTGXXC

SEQ ID NO: 3231 - protein, 15 aa, Artificial Sequence
  Synthetically generated peptide
  VARIANT (1)..(15): Xaa = Any Amino Acid
CCEXLCCNXPACTGC

SEQ ID NO: 3232 - protein, 16 aa, Artificial Sequence
  Synthetically generated peptide
  VARIANT (1)..(16): Xaa = Any Amino Acid
CCEXLCCNXXPACTGC

SEQ ID NO: 3233 - protein, 17 aa, Artificial Sequence
  Synthetically generated peptide
  VARIANT (1)..(17): Xaa = Any Amino Acid
CCEXLCCNXXXPACTGC

SEQ ID NO: 3234 - protein, 17 aa, Artificial Sequence
  Synthetically generated peptide
  VARIANT (1)..(17): Xaa = Any Amino Acid
CCEXLCCNXXPXACTGC

SEQ ID NO: 3235 - protein, 17 aa, Artificial Sequence
  Synthetically generated peptide
  VARIANT (1)..(17): Xaa = Any Amino Acid
CCEXLCCNXXPAXCTGC

SEQ ID NO: 3236 - protein, 17 aa, Artificial Sequence
  Synthetically generated peptide
  VARIANT (1)..(17): Xaa = Any Amino Acid
CCEXLCCNXXPACXTGC

SEQ ID NO: 3237 - protein, 17 aa, Artificial Sequence
  Synthetically generated peptide
  VARIANT (1)..(17): Xaa = Any Amino Acid
CCEXLCCNXXPACTXGC

SEQ ID NO: 3238 - protein, 17 aa, Artificial Sequence
  Synthetically generated peptide
  VARIANT (1)..(17): Xaa = Any Amino Acid
CCEXLCCNXXPACTGXC

SEQ ID NO: 3239 - protein, 16 aa, Artificial Sequence
  Synthetically generated peptide
  VARIANT (1)..(16): Xaa = Any Amino Acid
CCEXLCCNXPXACTGC

SEQ ID NO: 3240 - protein, 17 aa, Artificial Sequence
  Synthetically generated peptide
  VARIANT (1)..(17): Xaa = Any Amino Acid
CCEXLCCNXPXXACTGC

SEQ ID NO: 3241 - protein, 17 aa, Artificial Sequence
  Synthetically generated peptide
  VARIANT (1)..(17): Xaa = Any Amino Acid
CCEXLCCNXPXAXCTGC

SEQ ID NO: 3242 - protein, 17 aa, Artificial Sequence
  Synthetically generated peptide
  VARIANT (1)..(17): Xaa = Any Amino Acid
CCEXLCCNXPXACXTGC

SEQ ID NO: 3243 - protein, 17 aa, Artificial Sequence
  Synthetically generated peptide
  VARIANT (1)..(17): Xaa = Any Amino Acid
CCEXLCCNXPXACTXGC

SEQ ID NO: 3244 - protein, 17 aa, Artificial Sequence
  Synthetically generated peptide
  VARIANT (1)..(17): Xaa = Any Amino Acid
CCEXLCCNXPXACTGXC

SEQ ID NO: 3245 - protein, 16 aa, Artificial Sequence
  Synthetically generated peptide
  VARIANT (1)..(16): Xaa = Any Amino Acid
CCEXLCCNXPAXCTGC

SEQ ID NO: 3246 - protein, 17 aa, Artificial Sequence
  Synthetically generated peptide
  VARIANT (1)..(17): Xaa = Any Amino Acid
CCEXLCCNXPAXXCTGC

SEQ ID NO: 3247 - protein, 17 aa, Artificial Sequence
  Synthetically generated peptide
  VARIANT (1)..(17): Xaa = Any Amino Acid
CCEXLCCNXPAXCXTGC

SEQ ID NO: 3248 - protein, 17 aa, Artificial Sequence
  Synthetically generated peptide
  VARIANT (1)..(17): Xaa = Any Amino Acid
CCEXLCCNXPAXCTXGC

SEQ ID NO: 3249 - protein, 17 aa, Artificial Sequence
  Synthetically generated peptide
  VARIANT (1)..(17): Xaa = Any Amino Acid
CCEXLCCNXPAXCTGXC

SEQ ID NO: 3250 - protein, 16 aa, Artificial Sequence
  Synthetically generated peptide
  VARIANT (1)..(16): Xaa = Any Amino Acid
CCEXLCCNXPACXTGC

SEQ ID NO: 3251 - protein, 17 aa, Artificial Sequence
  Synthetically generated peptide
  VARIANT (1)..(17): Xaa = Any Amino Acid
CCEXLCCNXPACXXTGC

SEQ ID NO: 3252 - protein, 17 aa, Artificial Sequence
  Synthetically generated peptide
  VARIANT (1)..(17): Xaa = Any Amino Acid
CCEXLCCNXPACXTXGC

SEQ ID NO: 3253 - protein, 17 aa, Artificial Sequence
  Synthetically generated peptide
  VARIANT (1)..(17): Xaa = Any Amino Acid
CCEXLCCNXPACXTGXC

SEQ ID NO: 3254 - protein, 16 aa, Artificial Sequence
  Synthetically generated peptide
  VARIANT (1)..(16): Xaa = Any Amino Acid
CCEXLCCNXPACTXGC

SEQ ID NO: 3255 - protein, 17 aa, Artificial Sequence
  Synthetically generated peptide
  VARIANT (1)..(17): Xaa = Any Amino Acid
CCEXLCCNXPACTXXGC

SEQ ID NO: 3256 - protein, 17 aa, Artificial Sequence
  Synthetically generated peptide
  VARIANT (1)..(17): Xaa = Any Amino Acid
CCEXLCCNXPACTXGXC

SEQ ID NO: 3257 - protein, 16 aa, Artificial Sequence
  Synthetically generated peptide
  VARIANT (1)..(16): Xaa = Any Amino Acid
CCEXLCCNXPACTGXC

SEQ ID NO: 3258 - protein, 17 aa, Artificial Sequence
  Synthetically generated peptide
  VARIANT (1)..(17): Xaa = Any Amino Acid
CCEXLCCNXPACTGXXC

SEQ ID NO: 3259 - protein, 15 aa, Artificial Sequence
  Synthetically generated peptide
  VARIANT (1)..(15): Xaa = Any Amino Acid
CCEXLCCNPXACTGC

SEQ ID NO: 3260 - protein, 16 aa, Artificial Sequence
  Synthetically generated peptide
  VARIANT (1)..(16): Xaa = Any Amino Acid
CCEXLCCNPXXACTGC

SEQ ID NO: 3261 - protein, 17 aa, Artificial Sequence
  Synthetically generated peptide
  VARIANT (1)..(17): Xaa = Any Amino Acid
CCEXLCCNPXXXACTGC

SEQ ID NO: 3262 - protein, 17 aa, Artificial Sequence
  Synthetically generated peptide
  VARIANT (1)..(17): Xaa = Any Amino Acid
CCEXLCCNPXXAXCTGC

SEQ ID NO: 3263 - protein, 17 aa, Artificial Sequence
  Synthetically generated peptide
  VARIANT (1)..(17): Xaa = Any Amino Acid
CCEXLCCNPXXACXTGC

SEQ ID NO: 3264 - protein, 17 aa, Artificial Sequence
  Synthetically generated peptide
  VARIANT (1)..(17): Xaa = Any Amino Acid
CCEXLCCNPXXACTXGC

SEQ ID NO: 3265 - protein, 17 aa, Artificial Sequence
  Synthetically generated peptide
  VARIANT (1)..(17): Xaa = Any Amino Acid
CCEXLCCNPXXACTGXC

SEQ ID NO: 3266 - protein, 16 aa, Artificial Sequence
  Synthetically generated peptide
  VARIANT (1)..(16): Xaa = Any Amino Acid
CCEXLCCNPXAXCTGC

SEQ ID NO: 3267 - protein, 17 aa, Artificial Sequence
  Synthetically generated peptide
  VARIANT (1)..(17): Xaa = Any Amino Acid
CCEXLCCNPXAXXCTGC

SEQ ID NO: 3268 - protein, 17 aa, Artificial Sequence
  Synthetically generated peptide
  VARIANT (1)..(17): Xaa = Any Amino Acid
CCEXLCCNPXAXCXTGC

SEQ ID NO: 3269 - protein, 17 aa, Artificial Sequence
  Synthetically generated peptide
  VARIANT (1)..(17): Xaa = Any Amino Acid
CCEXLCCNPXAXCTXGC

SEQ ID NO: 3270 - protein, 17 aa, Artificial Sequence
  Synthetically generated peptide
  VARIANT (1)..(17): Xaa = Any Amino Acid
CCEXLCCNPXAXCTGXC

SEQ ID NO: 3271 - protein, 16 aa, Artificial Sequence
  Synthetically generated peptide
  VARIANT (1)..(16): Xaa = Any Amino Acid
CCEXLCCNPXACXTGC

SEQ ID NO: 3272 - protein, 17 aa, Artificial Sequence
  Synthetically generated peptide
  VARIANT (1)..(17): Xaa = Any Amino Acid
CCEXLCCNPXACXXTGC

SEQ ID NO: 3273 - protein, 17 aa, Artificial Sequence
  Synthetically generated peptide
  VARIANT (1)..(17): Xaa = Any Amino Acid
CCEXLCCNPXACXTXGC

SEQ ID NO: 3274 - protein, 17 aa, Artificial Sequence
  Synthetically generated peptide
  VARIANT (1)..(17): Xaa = Any Amino Acid
CCEXLCCNPXACXTGXC

SEQ ID NO: 3275 - protein, 16 aa, Artificial Sequence
  Synthetically generated peptide
  VARIANT (1)..(16): Xaa = Any Amino Acid
CCEXLCCNPXACTXGC

SEQ ID NO: 3276 - protein, 17 aa, Artificial Sequence
  Synthetically generated peptide
  VARIANT (1)..(17): Xaa = Any Amino Acid
CCEXLCCNPXACTXXGC

SEQ ID NO: 3277 - protein, 17 aa, Artificial Sequence
  Synthetically generated peptide
  VARIANT (1)..(17): Xaa = Any Amino Acid
CCEXLCCNPXACTXGXC

SEQ ID NO: 3278 - protein, 16 aa, Artificial Sequence
  Synthetically generated peptide
  VARIANT (1)..(16): Xaa = Any Amino Acid
CCEXLCCNPXACTGXC

SEQ ID NO: 3279 - protein, 17 aa, Artificial Sequence
  Synthetically generated peptide
  VARIANT (1)..(17): Xaa = Any Amino Acid
CCEXLCCNPXACTGXXC

SEQ ID NO: 3280 - protein, 15 aa, Artificial Sequence
  Synthetically generated peptide
  VARIANT (1)..(15): Xaa = Any Amino Acid
CCEXLCCNPAXCTGC

SEQ ID NO: 3281 - protein, 16 aa, Artificial Sequence
  Synthetically generated peptide
  VARIANT (1)..(16): Xaa = Any Amino Acid
CCEXLCCNPAXXCTGC

SEQ ID NO: 3282 - protein, 17 aa, Artificial Sequence
  Synthetically generated peptide
  VARIANT (1)..(17): Xaa = Any Amino Acid
CCEXLCCNPAXXXCTGC

SEQ ID NO: 3283 - protein, 17 aa, Artificial Sequence
  Synthetically generated peptide
  VARIANT (1)..(17): Xaa = Any Amino Acid
CCEXLCCNPAXXCXTGC

SEQ ID NO: 3284 - protein, 17 aa, Artificial Sequence
  Synthetically generated peptide
  VARIANT (1)..(17): Xaa = Any Amino Acid
CCEXLCCNPAXXCTXGC

SEQ ID NO: 3285 - protein, 17 aa, Artificial Sequence
  Synthetically generated peptide
  VARIANT (1)..(17): Xaa = Any Amino Acid
CCEXLCCNPAXXCTGXC

SEQ ID NO: 3286 - protein, 16 aa, Artificial Sequence
  Synthetically generated peptide
  VARIANT (1)..(16): Xaa = Any Amino Acid
CCEXLCCNPAXCXTGC

SEQ ID NO: 3287 - protein, 17 aa, Artificial Sequence
  Synthetically generated peptide
  VARIANT (1)..(17): Xaa = Any Amino Acid
CCEXLCCNPAXCXXTGC

SEQ ID NO: 3288 - protein, 17 aa, Artificial Sequence
  Synthetically generated peptide
  VARIANT (1)..(17): Xaa = Any Amino Acid
CCEXLCCNPAXCXTXGC

SEQ ID NO: 3289 - protein, 17 aa, Artificial Sequence
  Synthetically generated peptide
  VARIANT (1)..(17): Xaa = Any Amino Acid
CCEXLCCNPAXCXTGXC

SEQ ID NO: 3290 - protein, 16 aa, Artificial Sequence
  Synthetically generated peptide
  VARIANT (1)..(16): Xaa = Any Amino Acid
CCEXLCCNPAXCTXGC

SEQ ID NO: 3291 - protein, 17 aa, Artificial Sequence
  Synthetically generated peptide
  VARIANT (1)..(17): Xaa = Any Amino Acid
CCEXLCCNPAXCTXXGC

SEQ ID NO: 3292 - protein, 17 aa, Artificial Sequence
  Synthetically generated peptide
  VARIANT (1)..(17): Xaa = Any Amino Acid
CCEXLCCNPAXCTXGXC

SEQ ID NO: 3293 - protein, 16 aa, Artificial Sequence
  Synthetically generated peptide
  VARIANT (1)..(16): Xaa = Any Amino Acid
CCEXLCCNPAXCTGXC

SEQ ID NO: 3294 - protein, 17 aa, Artificial Sequence
  Synthetically generated peptide
  VARIANT (1)..(17): Xaa = Any Amino Acid
CCEXLCCNPAXCTGXXC

SEQ ID NO: 3295 - protein, 15 aa, Artificial Sequence
  Synthetically generated peptide
  VARIANT (1)..(15): Xaa = Any Amino Acid
CCEXLCCNPACXTGC

SEQ ID NO: 3296 - protein, 16 aa, Artificial Sequence
  Synthetically generated peptide
  VARIANT (1)..(16): Xaa = Any Amino Acid
CCEXLCCNPACXXTGC

SEQ ID NO: 3297 - protein, 17 aa, Artificial Sequence
  Synthetically generated peptide
  VARIANT (1)..(17): Xaa = Any Amino Acid
CCEXLCCNPACXXXTGC

SEQ ID NO: 3298 - protein, 17 aa, Artificial Sequence
  Synthetically generated peptide
  VARIANT (1)..(17): Xaa = Any Amino Acid
CCEXLCCNPACXXTXGC

SEQ ID NO: 3299 - protein, 17 aa, Artificial Sequence
  Synthetically generated peptide
  VARIANT (1)..(17): Xaa = Any Amino Acid
CCEXLCCNPACXXTGXC

SEQ ID NO: 3300 - protein, 16 aa, Artificial Sequence
  Synthetically generated peptide
  VARIANT (1)..(16): Xaa = Any Amino Acid
CCEXLCCNPACXTXGC

SEQ ID NO: 3301 - protein, 17 aa, Artificial Sequence
  Synthetically generated peptide
  VARIANT (1)..(17): Xaa = Any Amino Acid
CCEXLCCNPACXTXXGC

SEQ ID NO: 3302 - protein, 17 aa, Artificial Sequence
  Synthetically generated peptide
  VARIANT (1)..(17): Xaa = Any Amino Acid
CCEXLCCNPACXTXGXC

SEQ ID NO: 3303 - protein, 16 aa, Artificial Sequence
  Synthetically generated peptide
  VARIANT (1)..(16): Xaa = Any Amino Acid
CCEXLCCNPACXTGXC

SEQ ID NO: 3304 - protein, 17 aa, Artificial Sequence
  Synthetically generated peptide
  VARIANT (1)..(17): Xaa = Any Amino Acid
CCEXLCCNPACXTGXXC

SEQ ID NO: 3305 - protein, 15 aa, Artificial Sequence
  Synthetically generated peptide
  VARIANT (1)..(15): Xaa = Any Amino Acid
CCEXLCCNPACTXGC

SEQ ID NO: 3306 - protein, 16 aa, Artificial Sequence
  Synthetically generated peptide
  VARIANT (1)..(16): Xaa = Any Amino Acid
CCEXLCCNPACTXXGC

SEQ ID NO: 3307 - protein, 17 aa, Artificial Sequence
  Synthetically generated peptide
  VARIANT (1)..(17): Xaa = Any Amino Acid
CCEXLCCNPACTXXXGC

SEQ ID NO: 3308 - protein, 17 aa, Artificial Sequence
  Synthetically generated peptide
  VARIANT (1)..(17): Xaa = Any Amino Acid
CCEXLCCNPACTXXGXC

SEQ ID NO: 3309 - protein, 16 aa, Artificial Sequence
  Synthetically generated peptide
  VARIANT (1)..(16): Xaa = Any Amino Acid
CCEXLCCNPACTXGXC

SEQ ID NO: 3310 - protein, 17 aa, Artificial Sequence
  Synthetically generated peptide
  VARIANT (1)..(17): Xaa = Any Amino Acid
CCEXLCCNPACTXGXXC

SEQ ID NO: 3311 - protein, 15 aa, Artificial Sequence
  Synthetically generated peptide
  VARIANT (1)..(15): Xaa = Any Amino Acid
CCEXLCCNPACTGXC

SEQ ID NO: 3312 - protein, 16 aa, Artificial Sequence
  Synthetically generated peptide
  VARIANT (1)..(16): Xaa = Any Amino Acid
CCEXLCCNPACTGXXC

SEQ ID NO: 3313 - protein, 17 aa, Artificial Sequence
  Synthetically generated peptide
  VARIANT (1)..(17): Xaa = Any Amino Acid
CCEXLCCNPACTGXXXC

SEQ ID NO: 3314 - protein, 14 aa, Artificial Sequence
  Synthetically generated peptide
  VARIANT (1)..(14): Xaa = Any Amino Acid
CCELXCCNPACTGC

SEQ ID NO: 3315 - protein, 15 aa, Artificial Sequence
  Synthetically generated peptide
  VARIANT (1)..(15): Xaa = Any Amino Acid
CCELXXCCNPACTGC

SEQ ID NO: 3316 - protein, 16 aa, Artificial Sequence
  Synthetically generated peptide
  VARIANT (1)..(16): Xaa = Any Amino Acid
CCELXXXCCNPACTGC

SEQ ID NO: 3317 - protein, 17 aa, Artificial Sequence
  Synthetically generated peptide
  VARIANT (1)..(17): Xaa = Any Amino Acid
CCELXXXXCCNPACTGC

SEQ ID NO: 3318 - protein, 17 aa, Artificial Sequence
  Synthetically generated peptide
  VARIANT (1)..(17): Xaa = Any Amino Acid
CCELXXXCCXNPACTGC

SEQ ID NO: 3319 - protein, 17 aa, Artificial Sequence
  Synthetically generated peptide
  VARIANT (1)..(17): Xaa = Any Amino Acid
CCELXXXCCNXPACTGC

SEQ ID NO: 3320 - protein, 17 aa, Artificial Sequence
  Synthetically generated peptide
  VARIANT (1)..(17): Xaa = Any Amino Acid
CCELXXXCCNPXACTGC

SEQ ID NO: 3321 - protein, 17 aa, Artificial Sequence
  Synthetically generated peptide
  VARIANT (1)..(17): Xaa = Any Amino Acid
CCELXXXCCNPAXCTGC

SEQ ID NO: 3322 - protein, 17 aa, Artificial Sequence
  Synthetically generated peptide
  VARIANT (1)..(17): Xaa = Any Amino Acid
CCELXXXCCNPACXTGC

SEQ ID NO: 3323 - protein, 17 aa, Artificial Sequence
  Synthetically generated peptide
  VARIANT (1)..(17): Xaa = Any Amino Acid
CCELXXXCCNPACTXGC

SEQ ID NO: 3324 - protein, 17 aa, Artificial Sequence
  Synthetically generated peptide
  VARIANT (1)..(17): Xaa = Any Amino Acid
CCELXXXCCNPACTGXC

SEQ ID NO: 3325 - protein, 16 aa, Artificial Sequence
  Synthetically generated peptide
  VARIANT (1)..(16): Xaa = Any Amino Acid
CCELXXCCXNPACTGC

SEQ ID NO: 3326 - protein, 17 aa, Artificial Sequence
  Synthetically generated peptide
  VARIANT (1)..(17): Xaa = Any Amino Acid
CCELXXCCXXNPACTGC

SEQ ID NO: 3327 - protein, 17 aa, Artificial Sequence
  Synthetically generated peptide
  VARIANT (1)..(17): Xaa = Any Amino Acid
CCELXXCCXNXPACTGC

SEQ ID NO: 3328 - protein, 17 aa, Artificial Sequence
  Synthetically generated peptide
  VARIANT (1)..(17): Xaa = Any Amino Acid
CCELXXCCXNPXACTGC

SEQ ID NO: 3329 - protein, 17 aa, Artificial Sequence
  Synthetically generated peptide
  VARIANT (1)..(17): Xaa = Any Amino Acid
CCELXXCCXNPAXCTGC

SEQ ID NO: 3330 - protein, 17 aa, Artificial Sequence
  Synthetically generated peptide
  VARIANT (1)..(17): Xaa = Any Amino Acid
CCELXXCCXNPACXTGC

SEQ ID NO: 3331 - protein, 17 aa, Artificial Sequence
  Synthetically generated peptide
  VARIANT (1)..(17): Xaa = Any Amino Acid
CCELXXCCXNPACTXGC

SEQ ID NO: 3332 - protein, 17 aa, Artificial Sequence
  Synthetically generated peptide
  VARIANT (1)..(17): Xaa = Any Amino Acid
CCELXXCCXNPACTGXC

SEQ ID NO: 3333 - protein, 16 aa, Artificial Sequence
  Synthetically generated peptide
  VARIANT (1)..(16): Xaa = Any Amino Acid
CCELXXCCNXPACTGC

SEQ ID NO: 3334 - protein, 17 aa, Artificial Sequence
  Synthetically generated peptide
  VARIANT (1)..(17): Xaa = Any Amino Acid
CCELXXCCNXXPACTGC

SEQ ID NO: 3335 - protein, 17 aa, Artificial Sequence
  Synthetically generated peptide
  VARIANT (1)..(17): Xaa = Any Amino Acid
CCELXXCCNXPXACTGC

SEQ ID NO: 3336 - protein, 17 aa, Artificial Sequence
  Synthetically generated peptide
  VARIANT (1)..(17): Xaa = Any Amino Acid
CCELXXCCNXPAXCTGC

SEQ ID NO: 3337 - protein, 17 aa, Artificial Sequence
  Synthetically generated peptide
  VARIANT (1)..(17): Xaa = Any Amino Acid
CCELXXCCNXPACXTGC

SEQ ID NO: 3338 - protein, 17 aa, Artificial Sequence
  Synthetically generated peptide
  VARIANT (1)..(17): Xaa = Any Amino Acid
CCELXXCCNXPACTXGC

SEQ ID NO: 3339 - protein, 17 aa, Artificial Sequence
  Synthetically generated peptide
  VARIANT (1)..(17): Xaa = Any Amino Acid
CCELXXCCNXPACTGXC

SEQ ID NO: 3340 - protein, 16 aa, Artificial Sequence
  Synthetically generated peptide
  VARIANT (1)..(16): Xaa = Any Amino Acid
CCELXXCCNPXACTGC

SEQ ID NO: 3341 - protein, 17 aa, Artificial Sequence
  Synthetically generated peptide
  VARIANT (1)..(17): Xaa = Any Amino Acid
CCELXXCCNPXXACTGC

SEQ ID NO: 3342 - protein, 17 aa, Artificial Sequence
  Synthetically generated peptide
  VARIANT (1)..(17): Xaa = Any Amino Acid
CCELXXCCNPXAXCTGC

SEQ ID NO: 3343 - protein, 17 aa, Artificial Sequence
  Synthetically generated peptide
  VARIANT (1)..(17): Xaa = Any Amino Acid
CCELXXCCNPXACXTGC

SEQ ID NO: 3344 - protein, 17 aa, Artificial Sequence
  Synthetically generated peptide
  VARIANT (1)..(17): Xaa = Any Amino Acid
CCELXXCCNPXACTXGC

SEQ ID NO: 3345 - protein, 17 aa, Artificial Sequence
  Synthetically generated peptide
  VARIANT (1)..(17): Xaa = Any Amino Acid
CCELXXCCNPXACTGXC

SEQ ID NO: 3346 - protein, 16 aa, Artificial Sequence
  Synthetically generated peptide
  VARIANT (1)..(16): Xaa = Any Amino Acid
CCELXXCCNPAXCTGC

SEQ ID NO: 3347 - protein, 17 aa, Artificial Sequence
  Synthetically generated peptide
  VARIANT (1)..(17): Xaa = Any Amino Acid
CCELXXCCNPAXXCTGC

SEQ ID NO: 3348 - protein, 17 aa, Artificial Sequence
  Synthetically generated peptide
  VARIANT (1)..(17): Xaa = Any Amino Acid
CCELXXCCNPAXCXTGC

SEQ ID NO: 3349 - protein, 17 aa, Artificial Sequence
  Synthetically generated peptide
  VARIANT (1)..(17): Xaa = Any Amino Acid
CCELXXCCNPAXCTXGC

SEQ ID NO: 3350 - protein, 17 aa, Artificial Sequence
  Synthetically generated peptide
  VARIANT (1)..(17): Xaa = Any Amino Acid
CCELXXCCNPAXCTGXC

SEQ ID NO: 3351 - protein, 16 aa, Artificial Sequence
  Synthetically generated peptide
  VARIANT (1)..(16): Xaa = Any Amino Acid
CCELXXCCNPACXTGC

SEQ ID NO: 3352 - protein, 17 aa, Artificial Sequence
  Synthetically generated peptide
  VARIANT (1)..(17): Xaa = Any Amino Acid
CCELXXCCNPACXXTGC

SEQ ID NO: 3353 - protein, 17 aa, Artificial Sequence
  Synthetically generated peptide
  VARIANT (1)..(17): Xaa = Any Amino Acid
CCELXXCCNPACXTXGC

SEQ ID NO: 3354 - protein, 17 aa, Artificial Sequence
  Synthetically generated peptide
  VARIANT (1)..(17): Xaa = Any Amino Acid
CCELXXCCNPACXTGXC

SEQ ID NO: 3355 - protein, 16 aa, Artificial Sequence
  Synthetically generated peptide
  VARIANT (1)..(16): Xaa = Any Amino Acid
CCELXXCCNPACTXGC

SEQ ID NO: 3356 - protein, 17 aa, Artificial Sequence
  Synthetically generated peptide
  VARIANT (1)..(17): Xaa = Any Amino Acid
CCELXXCCNPACTXXGC

SEQ ID NO: 3357 - protein, 17 aa, Artificial Sequence
  Synthetically generated peptide
  VARIANT (1)..(17): Xaa = Any Amino Acid
CCELXXCCNPACTXGXC

SEQ ID NO: 3358 - protein, 16 aa, Artificial Sequence
  Synthetically generated peptide
  VARIANT (1)..(16): Xaa = Any Amino Acid
CCELXXCCNPACTGXC

SEQ ID NO: 3359 - protein, 17 aa, Artificial Sequence
  Synthetically generated peptide
  VARIANT (1)..(17): Xaa = Any Amino Acid
CCELXXCCNPACTGXXC

SEQ ID NO: 3360 - protein, 15 aa, Artificial Sequence
  Synthetically generated peptide
  VARIANT (1)..(15): Xaa = Any Amino Acid
CCELXCCXNPACTGC

SEQ ID NO: 3361 - protein, 16 aa, Artificial Sequence
  Synthetically generated peptide
  VARIANT (1)..(16): Xaa = Any Amino Acid
CCELXCCXXNPACTGC

SEQ ID NO: 3362 - protein, 17 aa, Artificial Sequence
  Synthetically generated peptide
  VARIANT (1)..(17): Xaa = Any Amino Acid
CCELXCCXXXNPACTGC

SEQ ID NO: 3363 - protein, 17 aa, Artificial Sequence
  Synthetically generated peptide
  VARIANT (1)..(17): Xaa = Any Amino Acid
CCELXCCXXNXPACTGC

SEQ ID NO: 3364 - protein, 17 aa, Artificial Sequence
  Synthetically generated peptide
  VARIANT (1)..(17): Xaa = Any Amino Acid
CCELXCCXXNPXACTGC

SEQ ID NO: 3365 - protein, 17 aa, Artificial Sequence
  Synthetically generated peptide
  VARIANT (1)..(17): Xaa = Any Amino Acid
CCELXCCXXNPAXCTGC

SEQ ID NO: 3366 - protein, 17 aa, Artificial Sequence
  Synthetically generated peptide
  VARIANT (1)..(17): Xaa = Any Amino Acid
CCELXCCXXNPACXTGC

SEQ ID NO: 3367 - protein, 17 aa, Artificial Sequence
  Synthetically generated peptide
  VARIANT (1)..(17): Xaa = Any Amino Acid
CCELXCCXXNPACTXGC

SEQ ID NO: 3368 - protein, 17 aa, Artificial Sequence
  Synthetically generated peptide
  VARIANT (1)..(17): Xaa = Any Amino Acid
CCELXCCXXNPACTGXC

SEQ ID NO: 3369 - protein, 16 aa, Artificial Sequence
  Synthetically generated peptide
  VARIANT (1)..(16): Xaa = Any Amino Acid
CCELXCCXNXPACTGC

SEQ ID NO: 3370 - protein, 17 aa, Artificial Sequence
  Synthetically generated peptide
  VARIANT (1)..(17): Xaa = Any Amino Acid
CCELXCCXNXXPACTGC

SEQ ID NO: 3371 - protein, 17 aa, Artificial Sequence
  Synthetically generated peptide
  VARIANT (1)..(17): Xaa = Any Amino Acid
CCELXCCXNXPXACTGC

SEQ ID NO: 3372 - protein, 17 aa, Artificial Sequence
  Synthetically generated peptide
  VARIANT (1)..(17): Xaa = Any Amino Acid
CCELXCCXNXPAXCTGC

SEQ ID NO: 3373 - protein, 17 aa, Artificial Sequence
  Synthetically generated peptide
  VARIANT (1)..(17): Xaa = Any Amino Acid
CCELXCCXNXPACXTGC

SEQ ID NO: 3374 - protein, 17 aa, Artificial Sequence
  Synthetically generated peptide
  VARIANT (1)..(17): Xaa = Any Amino Acid
CCELXCCXNXPACTXGC

SEQ ID NO: 3375 - protein, 17 aa, Artificial Sequence
  Synthetically generated peptide
  VARIANT (1)..(17): Xaa = Any Amino Acid
CCELXCCXNXPACTGXC

SEQ ID NO: 3376 - protein, 16 aa, Artificial Sequence
  Synthetically generated peptide
  VARIANT (1)..(16): Xaa = Any Amino Acid
CCELXCCXNPXACTGC

SEQ ID NO: 3377 - protein, 17 aa, Artificial Sequence
  Synthetically generated peptide
  VARIANT (1)..(17): Xaa = Any Amino Acid
CCELXCCXNPXXACTGC

SEQ ID NO: 3378 - protein, 17 aa, Artificial Sequence
  Synthetically generated peptide
  VARIANT (1)..(17): Xaa = Any Amino Acid
CCELXCCXNPXAXCTGC

SEQ ID NO: 3379 - protein, 17 aa, Artificial Sequence
  Synthetically generated peptide
  VARIANT (1)..(17): Xaa = Any Amino Acid
CCELXCCXNPXACXTGC

SEQ ID NO: 3380 - protein, 17 aa, Artificial Sequence
  Synthetically generated peptide
  VARIANT (1)..(17): Xaa = Any Amino Acid
CCELXCCXNPXACTXGC

SEQ ID NO: 3381 - protein, 17 aa, Artificial Sequence
  Synthetically generated peptide
  VARIANT (1)..(17): Xaa = Any Amino Acid
CCELXCCXNPXACTGXC

SEQ ID NO: 3382 - protein, 16 aa, Artificial Sequence
  Synthetically generated peptide
  VARIANT (1)..(16): Xaa = Any Amino Acid
CCELXCCXNPAXCTGC

SEQ ID NO: 3383 - protein, 17 aa, Artificial Sequence
  Synthetically generated peptide
  VARIANT (1)..(17): Xaa = Any Amino Acid
CCELXCCXNPAXXCTGC

SEQ ID NO: 3384 - protein, 17 aa, Artificial Sequence
  Synthetically generated peptide
  VARIANT (1)..(17): Xaa = Any Amino Acid
CCELXCCXNPAXCXTGC

SEQ ID NO: 3385 - protein, 17 aa, Artificial Sequence
  Synthetically generated peptide
  VARIANT (1)..(17): Xaa = Any Amino Acid
CCELXCCXNPAXCTXGC

SEQ ID NO: 3386 - protein, 17 aa, Artificial Sequence
  Synthetically generated peptide
  VARIANT (1)..(17): Xaa = Any Amino Acid
CCELXCCXNPAXCTGXC

SEQ ID NO: 3387 - protein, 16 aa, Artificial Sequence
  Synthetically generated peptide
  VARIANT (1)..(16): Xaa = Any Amino Acid
CCELXCCXNPACXTGC

SEQ ID NO: 3388 - protein, 17 aa, Artificial Sequence
  Synthetically generated peptide
  VARIANT (1)..(17): Xaa = Any Amino Acid
CCELXCCXNPACXXTGC

SEQ ID NO: 3389 - protein, 17 aa, Artificial Sequence
  Synthetically generated peptide
  VARIANT (1)..(17): Xaa = Any Amino Acid
CCELXCCXNPACXTXGC

SEQ ID NO: 3390 - protein, 17 aa, Artificial Sequence
  Synthetically generated peptide
  VARIANT (1)..(17): Xaa = Any Amino Acid
CCELXCCXNPACXTGXC

SEQ ID NO: 3391 - protein, 16 aa, Artificial Sequence
  Synthetically generated peptide
  VARIANT (1)..(16): Xaa = Any Amino Acid
CCELXCCXNPACTXGC

SEQ ID NO: 3392 - protein, 17 aa, Artificial Sequence
  Synthetically generated peptide
  VARIANT (1)..(17): Xaa = Any Amino Acid
CCELXCCXNPACTXXGC

SEQ ID NO: 3393 - protein, 17 aa, Artificial Sequence
  Synthetically generated peptide
  VARIANT (1)..(17): Xaa = Any Amino Acid
CCELXCCXNPACTXGXC

SEQ ID NO: 3394 - protein, 16 aa, Artificial Sequence
  Synthetically generated peptide
  VARIANT (1)..(16): Xaa = Any Amino Acid
CCELXCCXNPACTGXC

SEQ ID NO: 3395 - protein, 17 aa, Artificial Sequence
  Synthetically generated peptide
  VARIANT (1)..(17): Xaa = Any Amino Acid
CCELXCCXNPACTGXXC

SEQ ID NO: 3396 - protein, 15 aa, Artificial Sequence
  Synthetically generated peptide
  VARIANT (1)..(15): Xaa = Any Amino Acid
CCELXCCNXPACTGC

SEQ ID NO: 3397 - protein, 16 aa, Artificial Sequence
  Synthetically generated peptide
  VARIANT (1)..(16): Xaa = Any Amino Acid
CCELXCCNXXPACTGC

SEQ ID NO: 3398 - protein, 17 aa, Artificial Sequence
  Synthetically generated peptide
  VARIANT (1)..(17): Xaa = Any Amino Acid
CCELXCCNXXXPACTGC

SEQ ID NO: 3399 - protein, 17 aa, Artificial Sequence
  Synthetically generated peptide
  VARIANT (1)..(17): Xaa = Any Amino Acid
CCELXCCNXXPXACTGC

SEQ ID NO: 3400 - protein, 17 aa, Artificial Sequence
  Synthetically generated peptide
  VARIANT (1)..(17): Xaa = Any Amino Acid
CCELXCCNXXPAXCTGC

SEQ ID NO: 3401 - protein, 17 aa, Artificial Sequence
  Synthetically generated peptide
  VARIANT (1)..(17): Xaa = Any Amino Acid
CCELXCCNXXPACXTGC

SEQ ID NO: 3402 - protein, 17 aa, Artificial Sequence
  Synthetically generated peptide
  VARIANT (1)..(17): Xaa = Any Amino Acid
CCELXCCNXXPACTXGC

SEQ ID NO: 3403 - protein, 17 aa, Artificial Sequence
  Synthetically generated peptide
  VARIANT (1)..(17): Xaa = Any Amino Acid
CCELXCCNXXPACTGXC

SEQ ID NO: 3404 - protein, 16 aa, Artificial Sequence
  Synthetically generated peptide
  VARIANT (1)..(16): Xaa = Any Amino Acid
CCELXCCNXPXACTGC

SEQ ID NO: 3405 - protein, 17 aa, Artificial Sequence
  Synthetically generated peptide
  VARIANT (1)..(17): Xaa = Any Amino Acid
CCELXCCNXPXXACTGC

SEQ ID NO: 3406 - protein, 17 aa, Artificial Sequence
  Synthetically generated peptide
  VARIANT (1)..(17): Xaa = Any Amino Acid
CCELXCCNXPXAXCTGC

SEQ ID NO: 3407 - protein, 17 aa, Artificial Sequence
  Synthetically generated peptide
  VARIANT (1)..(17): Xaa = Any Amino Acid
CCELXCCNXPXACXTGC

SEQ ID NO: 3408 - protein, 17 aa, Artificial Sequence
  Synthetically generated peptide
  VARIANT (1)..(17): Xaa = Any Amino Acid
CCELXCCNXPXACTXGC

SEQ ID NO: 3409 - protein, 17 aa, Artificial Sequence
  Synthetically generated peptide
  VARIANT (1)..(17): Xaa = Any Amino Acid
CCELXCCNXPXACTGXC

SEQ ID NO: 3410 - protein, 16 aa, Artificial Sequence
  Synthetically generated peptide
  VARIANT (1)..(16): Xaa = Any Amino Acid
CCELXCCNXPAXCTGC

SEQ ID NO: 3411 - protein, 17 aa, Artificial Sequence
  Synthetically generated peptide
  VARIANT (1)..(17): Xaa = Any Amino Acid
CCELXCCNXPAXXCTGC

SEQ ID NO: 3412 - protein, 17 aa, Artificial Sequence
  Synthetically generated peptide
  VARIANT (1)..(17): Xaa = Any Amino Acid
CCELXCCNXPAXCXTGC

SEQ ID NO: 3413 - protein, 17 aa, Artificial Sequence
  Synthetically generated peptide
  VARIANT (1)..(17): Xaa = Any Amino Acid
CCELXCCNXPAXCTXGC

SEQ ID NO: 3414 - protein, 17 aa, Artificial Sequence
  Synthetically generated peptide
  VARIANT (1)..(17): Xaa = Any Amino Acid
CCELXCCNXPAXCTGXC

SEQ ID NO: 3415 - protein, 16 aa, Artificial Sequence
  Synthetically generated peptide
  VARIANT (1)..(16): Xaa = Any Amino Acid
CCELXCCNXPACXTGC

SEQ ID NO: 3416 - protein, 17 aa, Artificial Sequence
  Synthetically generated peptide
  VARIANT (1)..(17): Xaa = Any Amino Acid
CCELXCCNXPACXXTGC

SEQ ID NO: 3417 - protein, 17 aa, Artificial Sequence
  Synthetically generated peptide
  VARIANT (1)..(17): Xaa = Any Amino Acid
CCELXCCNXPACXTXGC

SEQ ID NO: 3418 - protein, 17 aa, Artificial Sequence
  Synthetically generated peptide
  VARIANT (1)..(17): Xaa = Any Amino Acid
CCELXCCNXPACXTGXC

SEQ ID NO: 3419 - protein, 16 aa, Artificial Sequence
  Synthetically generated peptide
  VARIANT (1)..(16): Xaa = Any Amino Acid
CCELXCCNXPACTXGC

SEQ ID NO: 3420 - protein, 17 aa, Artificial Sequence
  Synthetically generated peptide
  VARIANT (1)..(17): Xaa = Any Amino Acid
CCELXCCNXPACTXXGC

SEQ ID NO: 3421 - protein, 17 aa, Artificial Sequence
  Synthetically generated peptide
  VARIANT (1)..(17): Xaa = Any Amino Acid
CCELXCCNXPACTXGXC

SEQ ID NO: 3422 - protein, 16 aa, Artificial Sequence
  Synthetically generated peptide
  VARIANT (1)..(16): Xaa = Any Amino Acid
CCELXCCNXPACTGXC

SEQ ID NO: 3423 - protein, 17 aa, Artificial Sequence
  Synthetically generated peptide
  VARIANT (1)..(17): Xaa = Any Amino Acid
CCELXCCNXPACTGXXC

SEQ ID NO: 3424 - protein, 15 aa, Artificial Sequence
  Synthetically generated peptide
  VARIANT (1)..(15): Xaa = Any Amino Acid
CCELXCCNPXACTGC

SEQ ID NO: 3425 - protein, 16 aa, Artificial Sequence
  Synthetically generated peptide
  VARIANT (1)..(16): Xaa = Any Amino Acid
CCELXCCNPXXACTGC

SEQ ID NO: 3426 - protein, 17 aa, Artificial Sequence
  Synthetically generated peptide
  VARIANT (1)..(17): Xaa = Any Amino Acid
CCELXCCNPXXXACTGC

SEQ ID NO: 3427 - protein, 17 aa, Artificial Sequence
  Synthetically generated peptide
  VARIANT (1)..(17): Xaa = Any Amino Acid
CCELXCCNPXXAXCTGC

SEQ ID NO: 3428 - protein, 17 aa, Artificial Sequence
  Synthetically generated peptide
  VARIANT (1)..(17): Xaa = Any Amino Acid
CCELXCCNPXXACXTGC

SEQ ID NO: 3429 - protein, 17 aa, Artificial Sequence
  Synthetically generated peptide
  VARIANT (1)..(17): Xaa = Any Amino Acid
CCELXCCNPXXACTXGC

SEQ ID NO: 3430 - protein, 17 aa, Artificial Sequence
  Synthetically generated peptide
  VARIANT (1)..(17): Xaa = Any Amino Acid
CCELXCCNPXXACTGXC

SEQ ID NO: 3431 - protein, 16 aa, Artificial Sequence
  Synthetically generated peptide
  VARIANT (1)..(16): Xaa = Any Amino Acid
CCELXCCNPXAXCTGC

SEQ ID NO: 3432 - protein, 17 aa, Artificial Sequence
  Synthetically generated peptide
  VARIANT (1)..(17): Xaa = Any Amino Acid
CCELXCCNPXAXXCTGC

SEQ ID NO: 3433 - protein, 17 aa, Artificial Sequence
  Synthetically generated peptide
  VARIANT (1)..(17): Xaa = Any Amino Acid
CCELXCCNPXAXCXTGC

SEQ ID NO: 3434 - protein, 17 aa, Artificial Sequence
  Synthetically generated peptide
  VARIANT (1)..(17): Xaa = Any Amino Acid
CCELXCCNPXAXCTXGC

SEQ ID NO: 3435 - protein, 17 aa, Artificial Sequence
  Synthetically generated peptide
  VARIANT (1)..(17): Xaa = Any Amino Acid
CCELXCCNPXAXCTGXC

SEQ ID NO: 3436 - protein, 16 aa, Artificial Sequence
  Synthetically generated peptide
  VARIANT (1)..(16): Xaa = Any Amino Acid
CCELXCCNPXACXTGC

SEQ ID NO: 3437 - protein, 17 aa, Artificial Sequence
  Synthetically generated peptide
  VARIANT (1)..(17): Xaa = Any Amino Acid
CCELXCCNPXACXXTGC

SEQ ID NO: 3438 - protein, 17 aa, Artificial Sequence
  Synthetically generated peptide
  VARIANT (1)..(17): Xaa = Any Amino Acid
CCELXCCNPXACXTXGC

SEQ ID NO: 3439 - protein, 17 aa, Artificial Sequence
  Synthetically generated peptide
  VARIANT (1)..(17): Xaa = Any Amino Acid
CCELXCCNPXACXTGXC

SEQ ID NO: 3440 - protein, 16 aa, Artificial Sequence
  Synthetically generated peptide
  VARIANT (1)..(16): Xaa = Any Amino Acid
CCELXCCNPXACTXGC

SEQ ID NO: 3441 - protein, 17 aa, Artificial Sequence
  Synthetically generated peptide
  VARIANT (1)..(17): Xaa = Any Amino Acid
CCELXCCNPXACTXXGC

SEQ ID NO: 3442 - protein, 17 aa, Artificial Sequence
  Synthetically generated peptide
  VARIANT (1)..(17): Xaa = Any Amino Acid
CCELXCCNPXACTXGXC

SEQ ID NO: 3443 - protein, 16 aa, Artificial Sequence
  Synthetically generated peptide
  VARIANT (1)..(16): Xaa = Any Amino Acid
CCELXCCNPXACTGXC

SEQ ID NO: 3444 - protein, 17 aa, Artificial Sequence
  Synthetically generated peptide
  VARIANT (1)..(17): Xaa = Any Amino Acid
CCELXCCNPXACTGXXC

SEQ ID NO: 3445 - protein, 15 aa, Artificial Sequence
  Synthetically generated peptide
  VARIANT (1)..(15): Xaa = Any Amino Acid
CCELXCCNPAXCTGC

SEQ ID NO: 3446 - protein, 16 aa, Artificial Sequence
  Synthetically generated peptide
  VARIANT (1)..(16): Xaa = Any Amino Acid
CCELXCCNPAXXCTGC

SEQ ID NO: 3447 - protein, 17 aa, Artificial Sequence
  Synthetically generated peptide
  VARIANT (1)..(17): Xaa = Any Amino Acid
CCELXCCNPAXXXCTGC

SEQ ID NO: 3448 - protein, 17 aa, Artificial Sequence
  Synthetically generated peptide
  VARIANT (1)..(17): Xaa = Any Amino Acid
CCELXCCNPAXXCXTGC

SEQ ID NO: 3449 - protein, 17 aa, Artificial Sequence
  Synthetically generated peptide
  VARIANT (1)..(17): Xaa = Any Amino Acid
CCELXCCNPAXXCTXGC

SEQ ID NO: 3450 - protein, 17 aa, Artificial Sequence
  Synthetically generated peptide
  VARIANT (1)..(17): Xaa = Any Amino Acid
CCELXCCNPAXXCTGXC

SEQ ID NO: 3451 - protein, 16 aa, Artificial Sequence
  Synthetically generated peptide
  VARIANT (1)..(16): Xaa = Any Amino Acid
CCELXCCNPAXCXTGC

SEQ ID NO: 3452 - protein, 17 aa, Artificial Sequence
  Synthetically generated peptide
  VARIANT (1)..(17): Xaa = Any Amino Acid
CCELXCCNPAXCXXTGC

SEQ ID NO: 3453 - protein, 17 aa, Artificial Sequence
  Synthetically generated peptide
  VARIANT (1)..(17): Xaa = Any Amino Acid
CCELXCCNPAXCXTXGC

SEQ ID NO: 3454 - protein, 17 aa, Artificial Sequence
  Synthetically generated peptide
  VARIANT (1)..(17): Xaa = Any Amino Acid
CCELXCCNPAXCXTGXC

SEQ ID NO: 3455 - protein, 16 aa, Artificial Sequence
  Synthetically generated peptide
  VARIANT (1)..(16): Xaa = Any Amino Acid
CCELXCCNPAXCTXGC

SEQ ID NO: 3456 - protein, 17 aa, Artificial Sequence
  Synthetically generated peptide
  VARIANT (1)..(17): Xaa = Any Amino Acid
CCELXCCNPAXCTXXGC

SEQ ID NO: 3457 - protein, 17 aa, Artificial Sequence
  Synthetically generated peptide
  VARIANT (1)..(17): Xaa = Any Amino Acid
CCELXCCNPAXCTXGXC

SEQ ID NO: 3458 - protein, 16 aa, Artificial Sequence
  Synthetically generated peptide
  VARIANT (1)..(16): Xaa = Any Amino Acid
CCELXCCNPAXCTGXC

SEQ ID NO: 3459 - protein, 17 aa, Artificial Sequence
  Synthetically generated peptide
  VARIANT (1)..(17): Xaa = Any Amino Acid
CCELXCCNPAXCTGXXC

SEQ ID NO: 3460 - protein, 15 aa, Artificial Sequence
  Synthetically generated peptide
  VARIANT (1)..(15): Xaa = Any Amino Acid
CCELXCCNPACXTGC

SEQ ID NO: 3461 - protein, 16 aa, Artificial Sequence
  Synthetically generated peptide
  VARIANT (1)..(16): Xaa = Any Amino Acid
CCELXCCNPACXXTGC

SEQ ID NO: 3462 - protein, 17 aa, Artificial Sequence
  Synthetically generated peptide
  VARIANT (1)..(17): Xaa = Any Amino Acid
CCELXCCNPACXXXTGC

SEQ ID NO: 3463 - protein, 17 aa, Artificial Sequence
  Synthetically generated peptide
  VARIANT (1)..(17): Xaa = Any Amino Acid
CCELXCCNPACXXTXGC

SEQ ID NO: 3464 - protein, 17 aa, Artificial Sequence
  Synthetically generated peptide
  VARIANT (1)..(17): Xaa = Any Amino Acid
CCELXCCNPACXXTGXC

SEQ ID NO: 3465 - protein, 16 aa, Artificial Sequence
  Synthetically generated peptide
  VARIANT (1)..(16): Xaa = Any Amino Acid
CCELXCCNPACXTXGC

SEQ ID NO: 3466 - protein, 17 aa, Artificial Sequence
  Synthetically generated peptide
  VARIANT (1)..(17): Xaa = Any Amino Acid
CCELXCCNPACXTXXGC

SEQ ID NO: 3467 - protein, 17 aa, Artificial Sequence
  Synthetically generated peptide
  VARIANT (1)..(17): Xaa = Any Amino Acid
CCELXCCNPACXTXGXC

SEQ ID NO: 3468 - protein, 16 aa, Artificial Sequence
  Synthetically generated peptide
  VARIANT (1)..(16): Xaa = Any Amino Acid
CCELXCCNPACXTGXC

SEQ ID NO: 3469 - protein, 17 aa, Artificial Sequence
  Synthetically generated peptide
  VARIANT (1)..(17): Xaa = Any Amino Acid
CCELXCCNPACXTGXXC

SEQ ID NO: 3470 - protein, 15 aa, Artificial Sequence
  Synthetically generated peptide
  VARIANT (1)..(15): Xaa = Any Amino Acid
CCELXCCNPACTXGC

SEQ ID NO: 3471 - protein, 16 aa, Artificial Sequence
  Synthetically generated peptide
  VARIANT (1)..(16): Xaa = Any Amino Acid
CCELXCCNPACTXXGC

SEQ ID NO: 3472 - protein, 17 aa, Artificial Sequence
  Synthetically generated peptide
  VARIANT (1)..(17): Xaa = Any Amino Acid
CCELXCCNPACTXXXGC

SEQ ID NO: 3473 - protein, 17 aa, Artificial Sequence
  Synthetically generated peptide
  VARIANT (1)..(17): Xaa = Any Amino Acid
CCELXCCNPACTXXGXC

SEQ ID NO: 3474 - protein, 16 aa, Artificial Sequence
  Synthetically generated peptide
  VARIANT (1)..(16): Xaa = Any Amino Acid
CCELXCCNPACTXGXC

SEQ ID NO: 3475 - protein, 17 aa, Artificial Sequence
  Synthetically generated peptide
  VARIANT (1)..(17): Xaa = Any Amino Acid
CCELXCCNPACTXGXXC

SEQ ID NO: 3476 - protein, 15 aa, Artificial Sequence
  Synthetically generated peptide
  VARIANT (1)..(15): Xaa = Any Amino Acid
CCELXCCNPACTGXC

SEQ ID NO: 3477 - protein, 16 aa, Artificial Sequence
  Synthetically generated peptide
  VARIANT (1)..(16): Xaa = Any Amino Acid
CCELXCCNPACTGXXC

SEQ ID NO: 3478 - protein, 17 aa, Artificial Sequence
  Synthetically generated peptide
  VARIANT (1)..(17): Xaa = Any Amino Acid
CCELXCCNPACTGXXXC

SEQ ID NO: 3479 - protein, 14 aa, Artificial Sequence
  Synthetically generated peptide
  VARIANT (1)..(14): Xaa = Any Amino Acid
CCELCCXNPACTGC

SEQ ID NO: 3480 - protein, 15 aa, Artificial Sequence
  Synthetically generated peptide
  VARIANT (1)..(15): Xaa = Any Amino Acid
CCELCCXXNPACTGC

SEQ ID NO: 3481 - protein, 16 aa, Artificial Sequence
  Synthetically generated peptide
  VARIANT (1)..(16): Xaa = Any Amino Acid
CCELCCXXXNPACTGC

SEQ ID NO: 3482 - protein, 17 aa, Artificial Sequence
  Synthetically generated peptide
  VARIANT (1)..(17): Xaa = Any Amino Acid
CCELCCXXXXNPACTGC

SEQ ID NO: 3483 - protein, 17 aa, Artificial Sequence
  Synthetically generated peptide
  VARIANT (1)..(17): Xaa = Any Amino Acid
CCELCCXXXNXPACTGC

SEQ ID NO: 3484 - protein, 17 aa, Artificial Sequence
  Synthetically generated peptide
  VARIANT (1)..(17): Xaa = Any Amino Acid
CCELCCXXXNPXACTGC

SEQ ID NO: 3485 - protein, 17 aa, Artificial Sequence
  Synthetically generated peptide
  VARIANT (1)..(17): Xaa = Any Amino Acid
CCELCCXXXNPAXCTGC

SEQ ID NO: 3486 - protein, 17 aa, Artificial Sequence
  Synthetically generated peptide
  VARIANT (1)..(17): Xaa = Any Amino Acid
CCELCCXXXNPACXTGC

SEQ ID NO: 3487 - protein, 17 aa, Artificial Sequence
  Synthetically generated peptide
  VARIANT (1)..(17): Xaa = Any Amino Acid
CCELCCXXXNPACTXGC

SEQ ID NO: 3488 - protein, 17 aa, Artificial Sequence
  Synthetically generated peptide
  VARIANT (1)..(17): Xaa = Any Amino Acid
CCELCCXXXNPACTGXC

SEQ ID NO: 3489 - protein, 16 aa, Artificial Sequence
  Synthetically generated peptide
  VARIANT (1)..(16): Xaa = Any Amino Acid
CCELCCXXNXPACTGC

SEQ ID NO: 3490 - protein, 17 aa, Artificial Sequence
  Synthetically generated peptide
  VARIANT (1)..(17): Xaa = Any Amino Acid
CCELCCXXNXXPACTGC

SEQ ID NO: 3491 - protein, 17 aa, Artificial Sequence
  Synthetically generated peptide
  VARIANT (1)..(17): Xaa = Any Amino Acid
CCELCCXXNXPXACTGC

SEQ ID NO: 3492 - protein, 17 aa, Artificial Sequence
  Synthetically generated peptide
  VARIANT (1)..(17): Xaa = Any Amino Acid
CCELCCXXNXPAXCTGC

SEQ ID NO: 3493 - protein, 17 aa, Artificial Sequence
  Synthetically generated peptide
  VARIANT (1)..(17): Xaa = Any Amino Acid
CCELCCXXNXPACXTGC

SEQ ID NO: 3494 - protein, 17 aa, Artificial Sequence
  Synthetically generated peptide
  VARIANT (1)..(17): Xaa = Any Amino Acid
CCELCCXXNXPACTXGC

SEQ ID NO: 3495 - protein, 17 aa, Artificial Sequence
  Synthetically generated peptide
  VARIANT (1)..(17): Xaa = Any Amino Acid
CCELCCXXNXPACTGXC

SEQ ID NO: 3496 - protein, 16 aa, Artificial Sequence
  Synthetically generated peptide
  VARIANT (1)..(16): Xaa = Any Amino Acid
CCELCCXXNPXACTGC

SEQ ID NO: 3497 - protein, 17 aa, Artificial Sequence
  Synthetically generated peptide
  VARIANT (1)..(17): Xaa = Any Amino Acid
CCELCCXXNPXXACTGC

SEQ ID NO: 3498 - protein, 17 aa, Artificial Sequence
  Synthetically generated peptide
  VARIANT (1)..(17): Xaa = Any Amino Acid
CCELCCXXNPXAXCTGC

SEQ ID NO: 3499 - protein, 17 aa, Artificial Sequence
  Synthetically generated peptide
  VARIANT (1)..(17): Xaa = Any Amino Acid
CCELCCXXNPXACXTGC

SEQ ID NO: 3500 - protein, 17 aa, Artificial Sequence
  Synthetically generated peptide
  VARIANT (1)..(17): Xaa = Any Amino Acid
CCELCCXXNPXACTXGC

SEQ ID NO: 3501 - protein, 17 aa, Artificial Sequence
  Synthetically generated peptide
  VARIANT (1)..(17): Xaa = Any Amino Acid
CCELCCXXNPXACTGXC

SEQ ID NO: 3502 - protein, 16 aa, Artificial Sequence
  Synthetically generated peptide
  VARIANT (1)..(16): Xaa = Any Amino Acid
CCELCCXXNPAXCTGC

SEQ ID NO: 3503 - protein, 17 aa, Artificial Sequence
  Synthetically generated peptide
  VARIANT (1)..(17): Xaa = Any Amino Acid
CCELCCXXNPAXXCTGC

SEQ ID NO: 3504 - protein, 17 aa, Artificial Sequence
  Synthetically generated peptide
  VARIANT (1)..(17): Xaa = Any Amino Acid
CCELCCXXNPAXCXTGC

SEQ ID NO: 3505 - protein, 17 aa, Artificial Sequence
  Synthetically generated peptide
  VARIANT (1)..(17): Xaa = Any Amino Acid
CCELCCXXNPAXCTXGC

SEQ ID NO: 3506 - protein, 17 aa, Artificial Sequence
  Synthetically generated peptide
  VARIANT (1)..(17): Xaa = Any Amino Acid
CCELCCXXNPAXCTGXC

SEQ ID NO: 3507 - protein, 16 aa, Artificial Sequence
  Synthetically generated peptide
  VARIANT (1)..(16): Xaa = Any Amino Acid
CCELCCXXNPACXTGC

SEQ ID NO: 3508 - protein, 17 aa, Artificial Sequence
  Synthetically generated peptide
  VARIANT (1)..(17): Xaa = Any Amino Acid
CCELCCXXNPACXXTGC

SEQ ID NO: 3509 - protein, 17 aa, Artificial Sequence
  Synthetically generated peptide
  VARIANT (1)..(17): Xaa = Any Amino Acid
CCELCCXXNPACXTXGC

SEQ ID NO: 3510 - protein, 17 aa, Artificial Sequence
  Synthetically generated peptide
  VARIANT (1)..(17): Xaa = Any Amino Acid
CCELCCXXNPACXTGXC

SEQ ID NO: 3511 - protein, 16 aa, Artificial Sequence
  Synthetically generated peptide
  VARIANT (1)..(16): Xaa = Any Amino Acid
CCELCCXXNPACTXGC

SEQ ID NO: 3512 - protein, 17 aa, Artificial Sequence
  Synthetically generated peptide
  VARIANT (1)..(17): Xaa = Any Amino Acid
CCELCCXXNPACTXXGC

SEQ ID NO: 3513 - protein, 17 aa, Artificial Sequence
  Synthetically generated peptide
  VARIANT (1)..(17): Xaa = Any Amino Acid
CCELCCXXNPACTXGXC

SEQ ID NO: 3514 - protein, 16 aa, Artificial Sequence
  Synthetically generated peptide
  VARIANT (1)..(16): Xaa = Any Amino Acid
CCELCCXXNPACTGXC

SEQ ID NO: 3515 - protein, 17 aa, Artificial Sequence
  Synthetically generated peptide
  VARIANT (1)..(17): Xaa = Any Amino Acid
CCELCCXXNPACTGXXC

SEQ ID NO: 3516 - protein, 15 aa, Artificial Sequence
  Synthetically generated peptide
  VARIANT (1)..(15): Xaa = Any Amino Acid
CCELCCXNXPACTGC

SEQ ID NO: 3517 - protein, 16 aa, Artificial Sequence
  Synthetically generated peptide
  VARIANT (1)..(16): Xaa = Any Amino Acid
CCELCCXNXXPACTGC

SEQ ID NO: 3518 - protein, 17 aa, Artificial Sequence
  Synthetically generated peptide
  VARIANT (1)..(17): Xaa = Any Amino Acid
CCELCCXNXXXPACTGC

SEQ ID NO: 3519 - protein, 17 aa, Artificial Sequence
  Synthetically generated peptide
  VARIANT (1)..(17): Xaa = Any Amino Acid
CCELCCXNXXPXACTGC

SEQ ID NO: 3520 - protein, 17 aa, Artificial Sequence
  Synthetically generated peptide
  VARIANT (1)..(17): Xaa = Any Amino Acid
CCELCCXNXXPAXCTGC

SEQ ID NO: 3521 - protein, 17 aa, Artificial Sequence
  Synthetically generated peptide
  VARIANT (1)..(17): Xaa = Any Amino Acid
CCELCCXNXXPACXTGC

SEQ ID NO: 3522 - protein, 17 aa, Artificial Sequence
  Synthetically generated peptide
  VARIANT (1)..(17): Xaa = Any Amino Acid
CCELCCXNXXPACTXGC

SEQ ID NO: 3523 - protein, 17 aa, Artificial Sequence
  Synthetically generated peptide
  VARIANT (1)..(17): Xaa = Any Amino Acid
CCELCCXNXXPACTGXC

SEQ ID NO: 3524 - protein, 16 aa, Artificial Sequence
  Synthetically generated peptide
  VARIANT (1)..(16): Xaa = Any Amino Acid
CCELCCXNXPXACTGC

SEQ ID NO: 3525 - protein, 17 aa, Artificial Sequence
  Synthetically generated peptide
  VARIANT (1)..(17): Xaa = Any Amino Acid
CCELCCXNXPXXACTGC

SEQ ID NO: 3526 - protein, 17 aa, Artificial Sequence
  Synthetically generated peptide
  VARIANT (1)..(17): Xaa = Any Amino Acid
CCELCCXNXPXAXCTGC

SEQ ID NO: 3527 - protein, 17 aa, Artificial Sequence
  Synthetically generated peptide
  VARIANT (1)..(17): Xaa = Any Amino Acid
CCELCCXNXPXACXTGC

SEQ ID NO: 3528 - protein, 17 aa, Artificial Sequence
  Synthetically generated peptide
  VARIANT (1)..(17): Xaa = Any Amino Acid
CCELCCXNXPXACTXGC

SEQ ID NO: 3529 - protein, 17 aa, Artificial Sequence
  Synthetically generated peptide
  VARIANT (1)..(17): Xaa = Any Amino Acid
CCELCCXNXPXACTGXC

SEQ ID NO: 3530 - protein, 16 aa, Artificial Sequence
  Synthetically generated peptide
  VARIANT (1)..(16): Xaa = Any Amino Acid
CCELCCXNXPAXCTGC

SEQ ID NO: 3531 - protein, 17 aa, Artificial Sequence
  Synthetically generated peptide
  VARIANT (1)..(17): Xaa = Any Amino Acid
CCELCCXNXPAXXCTGC

SEQ ID NO: 3532 - protein, 17 aa, Artificial Sequence
  Synthetically generated peptide
  VARIANT (1)..(17): Xaa = Any Amino Acid
CCELCCXNXPAXCXTGC

SEQ ID NO: 3533 - protein, 17 aa, Artificial Sequence
  Synthetically generated peptide
  VARIANT (1)..(17): Xaa = Any Amino Acid
CCELCCXNXPAXCTXGC

SEQ ID NO: 3534 - protein, 17 aa, Artificial Sequence
  Synthetically generated peptide
  VARIANT (1)..(17): Xaa = Any Amino Acid
CCELCCXNXPAXCTGXC

SEQ ID NO: 3535 - protein, 16 aa, Artificial Sequence
  Synthetically generated peptide
  VARIANT (1)..(16): Xaa = Any Amino Acid
CCELCCXNXPACXTGC

SEQ ID NO: 3536 - protein, 17 aa, Artificial Sequence
  Synthetically generated peptide
  VARIANT (1)..(17): Xaa = Any Amino Acid
CCELCCXNXPACXXTGC

SEQ ID NO: 3537 - protein, 17 aa, Artificial Sequence
  Synthetically generated peptide
  VARIANT (1)..(17): Xaa = Any Amino Acid
CCELCCXNXPACXTXGC

SEQ ID NO: 3538 - protein, 17 aa, Artificial Sequence
  Synthetically generated peptide
  VARIANT (1)..(17): Xaa = Any Amino Acid
CCELCCXNXPACXTGXC

SEQ ID NO: 3539 - protein, 16 aa, Artificial Sequence
  Synthetically generated peptide
  VARIANT (1)..(16): Xaa = Any Amino Acid
CCELCCXNXPACTXGC

SEQ ID NO: 3540 - protein, 17 aa, Artificial Sequence
  Synthetically generated peptide
  VARIANT (1)..(17): Xaa = Any Amino Acid
CCELCCXNXPACTXXGC

SEQ ID NO: 3541 - protein, 17 aa, Artificial Sequence
  Synthetically generated peptide
  VARIANT (1)..(17): Xaa = Any Amino Acid
CCELCCXNXPACTXGXC

SEQ ID NO: 3542 - protein, 16 aa, Artificial Sequence
  Synthetically generated peptide
  VARIANT (1)..(16): Xaa = Any Amino Acid
CCELCCXNXPACTGXC

SEQ ID NO: 3543 - protein, 17 aa, Artificial Sequence
  Synthetically generated peptide
  VARIANT (1)..(17): Xaa = Any Amino Acid
CCELCCXNXPACTGXXC

SEQ ID NO: 3544 - protein, 15 aa, Artificial Sequence
  Synthetically generated peptide
  VARIANT (1)..(15): Xaa = Any Amino Acid
CCELCCXNPXACTGC

SEQ ID NO: 3545 - protein, 16 aa, Artificial Sequence
  Synthetically generated peptide
  VARIANT (1)..(16): Xaa = Any Amino Acid
CCELCCXNPXXACTGC

SEQ ID NO: 3546 - protein, 17 aa, Artificial Sequence
  Synthetically generated peptide
  VARIANT (1)..(17): Xaa = Any Amino Acid
CCELCCXNPXXXACTGC

SEQ ID NO: 3547 - protein, 17 aa, Artificial Sequence
  Synthetically generated peptide
  VARIANT (1)..(17): Xaa = Any Amino Acid
CCELCCXNPXXAXCTGC

SEQ ID NO: 3548 - protein, 17 aa, Artificial Sequence
  Synthetically generated peptide
  VARIANT (1)..(17): Xaa = Any Amino Acid
CCELCCXNPXXACXTGC

SEQ ID NO: 3549 - protein, 17 aa, Artificial Sequence
  Synthetically generated peptide
  VARIANT (1)..(17): Xaa = Any Amino Acid
CCELCCXNPXXACTXGC

SEQ ID NO: 3550 - protein, 17 aa, Artificial Sequence
  Synthetically generated peptide
  VARIANT (1)..(17): Xaa = Any Amino Acid
CCELCCXNPXXACTGXC

SEQ ID NO: 3551 - protein, 16 aa, Artificial Sequence
  Synthetically generated peptide
  VARIANT (1)..(16): Xaa = Any Amino Acid
CCELCCXNPXAXCTGC

SEQ ID NO: 3552 - protein, 17 aa, Artificial Sequence
  Synthetically generated peptide
  VARIANT (1)..(17): Xaa = Any Amino Acid
CCELCCXNPXAXXCTGC

SEQ ID NO: 3553 - protein, 17 aa, Artificial Sequence
  Synthetically generated peptide
  VARIANT (1)..(17): Xaa = Any Amino Acid
CCELCCXNPXAXCXTGC

SEQ ID NO: 3554 - protein, 17 aa, Artificial Sequence
  Synthetically generated peptide
  VARIANT (1)..(17): Xaa = Any Amino Acid
CCELCCXNPXAXCTXGC

SEQ ID NO: 3555 - protein, 17 aa, Artificial Sequence
  Synthetically generated peptide
  VARIANT (1)..(17): Xaa = Any Amino Acid
CCELCCXNPXAXCTGXC

SEQ ID NO: 3556 - protein, 16 aa, Artificial Sequence
  Synthetically generated peptide
  VARIANT (1)..(16): Xaa = Any Amino Acid
CCELCCXNPXACXTGC

SEQ ID NO: 3557 - protein, 17 aa, Artificial Sequence
  Synthetically generated peptide
  VARIANT (1)..(17): Xaa = Any Amino Acid
CCELCCXNPXACXXTGC

SEQ ID NO: 3558 - protein, 17 aa, Artificial Sequence
  Synthetically generated peptide
  VARIANT (1)..(17): Xaa = Any Amino Acid
CCELCCXNPXACXTXGC

SEQ ID NO: 3559 - protein, 17 aa, Artificial Sequence
  Synthetically generated peptide
  VARIANT (1)..(17): Xaa = Any Amino Acid
CCELCCXNPXACXTGXC

SEQ ID NO: 3560 - protein, 16 aa, Artificial Sequence
  Synthetically generated peptide
  VARIANT (1)..(16): Xaa = Any Amino Acid
CCELCCXNPXACTXGC

SEQ ID NO: 3561 - protein, 17 aa, Artificial Sequence
  Synthetically generated peptide
  VARIANT (1)..(17): Xaa = Any Amino Acid
CCELCCXNPXACTXXGC

SEQ ID NO: 3562 - protein, 17 aa, Artificial Sequence
  Synthetically generated peptide
  VARIANT (1)..(17): Xaa = Any Amino Acid
CCELCCXNPXACTXGXC

SEQ ID NO: 3563 - protein, 16 aa, Artificial Sequence
  Synthetically generated peptide
  VARIANT (1)..(16): Xaa = Any Amino Acid
CCELCCXNPXACTGXC

SEQ ID NO: 3564 - protein, 17 aa, Artificial Sequence
  Synthetically generated peptide
  VARIANT (1)..(17): Xaa = Any Amino Acid
CCELCCXNPXACTGXXC

SEQ ID NO: 3565 - protein, 15 aa, Artificial Sequence
  Synthetically generated peptide
  VARIANT (1)..(15): Xaa = Any Amino Acid
CCELCCXNPAXCTGC

SEQ ID NO: 3566 - protein, 16 aa, Artificial Sequence
  Synthetically generated peptide
  VARIANT (1)..(16): Xaa = Any Amino Acid
CCELCCXNPAXXCTGC

SEQ ID NO: 3567 - protein, 17 aa, Artificial Sequence
  Synthetically generated peptide
  VARIANT (1)..(17): Xaa = Any Amino Acid
CCELCCXNPAXXXCTGC

SEQ ID NO: 3568 - protein, 17 aa, Artificial Sequence
  Synthetically generated peptide
  VARIANT (1)..(17): Xaa = Any Amino Acid
CCELCCXNPAXXCXTGC

SEQ ID NO: 3569 - protein, 17 aa, Artificial Sequence
  Synthetically generated peptide
  VARIANT (1)..(17): Xaa = Any Amino Acid
CCELCCXNPAXXCTXGC

SEQ ID NO: 3570 - protein, 17 aa, Artificial Sequence
  Synthetically generated peptide
  VARIANT (1)..(17): Xaa = Any Amino Acid
CCELCCXNPAXXCTGXC

SEQ ID NO: 3571 - protein, 16 aa, Artificial Sequence
  Synthetically generated peptide
  VARIANT (1)..(16): Xaa = Any Amino Acid
CCELCCXNPAXCXTGC

SEQ ID NO: 3572 - protein, 17 aa, Artificial Sequence
  Synthetically generated peptide
  VARIANT (1)..(17): Xaa = Any Amino Acid
CCELCCXNPAXCXXTGC

SEQ ID NO: 3573 - protein, 17 aa, Artificial Sequence
  Synthetically generated peptide
  VARIANT (1)..(17): Xaa = Any Amino Acid
CCELCCXNPAXCXTXGC

SEQ ID NO: 3574 - protein, 17 aa, Artificial Sequence
  Synthetically generated peptide
  VARIANT (1)..(17): Xaa = Any Amino Acid
CCELCCXNPAXCXTGXC

SEQ ID NO: 3575 - protein, 16 aa, Artificial Sequence
  Synthetically generated peptide
  VARIANT (1)..(16): Xaa = Any Amino Acid
CCELCCXNPAXCTXGC

SEQ ID NO: 3576 - protein, 17 aa, Artificial Sequence
  Synthetically generated peptide
  VARIANT (1)..(17): Xaa = Any Amino Acid
CCELCCXNPAXCTXXGC

SEQ ID NO: 3577 - protein, 17 aa, Artificial Sequence
  Synthetically generated peptide
  VARIANT (1)..(17): Xaa = Any Amino Acid
CCELCCXNPAXCTXGXC

SEQ ID NO: 3578 - protein, 16 aa, Artificial Sequence
  Synthetically generated peptide
  VARIANT (1)..(16): Xaa = Any Amino Acid
CCELCCXNPAXCTGXC

SEQ ID NO: 3579 - protein, 17 aa, Artificial Sequence
  Synthetically generated peptide
  VARIANT (1)..(17): Xaa = Any Amino Acid
CCELCCXNPAXCTGXXC

SEQ ID NO: 3580 - protein, 15 aa, Artificial Sequence
  Synthetically generated peptide
  VARIANT (1)..(15): Xaa = Any Amino Acid
CCELCCXNPACXTGC

SEQ ID NO: 3581 - protein, 16 aa, Artificial Sequence
  Synthetically generated peptide
  VARIANT (1)..(16): Xaa = Any Amino Acid
CCELCCXNPACXXTGC

SEQ ID NO: 3582 - protein, 17 aa, Artificial Sequence
  Synthetically generated peptide
  VARIANT (1)..(17): Xaa = Any Amino Acid
CCELCCXNPACXXXTGC

SEQ ID NO: 3583 - protein, 17 aa, Artificial Sequence
  Synthetically generated peptide
  VARIANT (1)..(17): Xaa = Any Amino Acid
CCELCCXNPACXXTXGC

SEQ ID NO: 3584 - protein, 17 aa, Artificial Sequence
  Synthetically generated peptide
  VARIANT (1)..(17): Xaa = Any Amino Acid
CCELCCXNPACXXTGXC

SEQ ID NO: 3585 - protein, 16 aa, Artificial Sequence
  Synthetically generated peptide
  VARIANT (1)..(16): Xaa = Any Amino Acid
CCELCCXNPACXTXGC

SEQ ID NO: 3586 - protein, 17 aa, Artificial Sequence
  Synthetically generated peptide
  VARIANT (1)..(17): Xaa = Any Amino Acid
CCELCCXNPACXTXXGC

SEQ ID NO: 3587 - protein, 17 aa, Artificial Sequence
  Synthetically generated peptide
  VARIANT (1)..(17): Xaa = Any Amino Acid
CCELCCXNPACXTXGXC

SEQ ID NO: 3588 - protein, 16 aa, Artificial Sequence
  Synthetically generated peptide
  VARIANT (1)..(16): Xaa = Any Amino Acid
CCELCCXNPACXTGXC

SEQ ID NO: 3589 - protein, 17 aa, Artificial Sequence
  Synthetically generated peptide
  VARIANT (1)..(17): Xaa = Any Amino Acid
CCELCCXNPACXTGXXC

SEQ ID NO: 3590 - protein, 15 aa, Artificial Sequence
  Synthetically generated peptide
  VARIANT (1)..(15): Xaa = Any Amino Acid
CCELCCXNPACTXGC

SEQ ID NO: 3591 - protein, 16 aa, Artificial Sequence
  Synthetically generated peptide
  VARIANT (1)..(16): Xaa = Any Amino Acid
CCELCCXNPACTXXGC

SEQ ID NO: 3592 - protein, 17 aa, Artificial Sequence
  Synthetically generated peptide
  VARIANT (1)..(17): Xaa = Any Amino Acid
CCELCCXNPACTXXXGC

SEQ ID NO: 3593 - protein, 17 aa, Artificial Sequence
  Synthetically generated peptide
  VARIANT (1)..(17): Xaa = Any Amino Acid
CCELCCXNPACTXXGXC

SEQ ID NO: 3594 - protein, 16 aa, Artificial Sequence
  Synthetically generated peptide
  VARIANT (1)..(16): Xaa = Any Amino Acid
CCELCCXNPACTXGXC

SEQ ID NO: 3595 - protein, 17 aa, Artificial Sequence
  Synthetically generated peptide
  VARIANT (1)..(17): Xaa = Any Amino Acid
CCELCCXNPACTXGXXC

SEQ ID NO: 3596 - protein, 15 aa, Artificial Sequence
  Synthetically generated peptide
  VARIANT (1)..(15): Xaa = Any Amino Acid
CCELCCXNPACTGXC

SEQ ID NO: 3597 - protein, 16 aa, Artificial Sequence
  Synthetically generated peptide
  VARIANT (1)..(16): Xaa = Any Amino Acid
CCELCCXNPACTGXXC

SEQ ID NO: 3598 - protein, 17 aa, Artificial Sequence
  Synthetically generated peptide
  VARIANT (1)..(17): Xaa = Any Amino Acid
CCELCCXNPACTGXXXC

SEQ ID NO: 3599 - protein, 14 aa, Artificial Sequence
  Synthetically generated peptide
  VARIANT (1)..(14): Xaa = Any Amino Acid
CCELCCNXPACTGC

SEQ ID NO: 3600 - protein, 15 aa, Artificial Sequence
  Synthetically generated peptide
  VARIANT (1)..(15): Xaa = Any Amino Acid
CCELCCNXXPACTGC

SEQ ID NO: 3601 - protein, 16 aa, Artificial Sequence
  Synthetically generated peptide
  VARIANT (1)..(16): Xaa = Any Amino Acid
CCELCCNXXXPACTGC

SEQ ID NO: 3602 - protein, 17 aa, Artificial Sequence
  Synthetically generated peptide
  VARIANT (1)..(17): Xaa = Any Amino Acid
CCELCCNXXXXPACTGC

SEQ ID NO: 3603 - protein, 17 aa, Artificial Sequence
  Synthetically generated peptide
  VARIANT (1)..(17): Xaa = Any Amino Acid
CCELCCNXXXPXACTGC

SEQ ID NO: 3604 - protein, 17 aa, Artificial Sequence
  Synthetically generated peptide
  VARIANT (1)..(17): Xaa = Any Amino Acid
CCELCCNXXXPAXCTGC

SEQ ID NO: 3605 - protein, 17 aa, Artificial Sequence
  Synthetically generated peptide
  VARIANT (1)..(17): Xaa = Any Amino Acid
CCELCCNXXXPACXTGC

SEQ ID NO: 3606 - protein, 17 aa, Artificial Sequence
  Synthetically generated peptide
  VARIANT (1)..(17): Xaa = Any Amino Acid
CCELCCNXXXPACTXGC

SEQ ID NO: 3607 - protein, 17 aa, Artificial Sequence
  Synthetically generated peptide
  VARIANT (1)..(17): Xaa = Any Amino Acid
CCELCCNXXXPACTGXC

SEQ ID NO: 3608 - protein, 16 aa, Artificial Sequence
  Synthetically generated peptide
  VARIANT (1)..(16): Xaa = Any Amino Acid
CCELCCNXXPXACTGC

SEQ ID NO: 3609 - protein, 17 aa, Artificial Sequence
  Synthetically generated peptide
  VARIANT (1)..(17): Xaa = Any Amino Acid
CCELCCNXXPXXACTGC

SEQ ID NO: 3610 - protein, 17 aa, Artificial Sequence
  Synthetically generated peptide
  VARIANT (1)..(17): Xaa = Any Amino Acid
CCELCCNXXPXAXCTGC

SEQ ID NO: 3611 - protein, 17 aa, Artificial Sequence
  Synthetically generated peptide
  VARIANT (1)..(17): Xaa = Any Amino Acid
CCELCCNXXPXACXTGC

SEQ ID NO: 3612 - protein, 17 aa, Artificial Sequence
  Synthetically generated peptide
  VARIANT (1)..(17): Xaa = Any Amino Acid
CCELCCNXXPXACTXGC

SEQ ID NO: 3613 - protein, 17 aa, Artificial Sequence
  Synthetically generated peptide
  VARIANT (1)..(17): Xaa = Any Amino Acid
CCELCCNXXPXACTGXC

SEQ ID NO: 3614 - protein, 16 aa, Artificial Sequence
  Synthetically generated peptide
  VARIANT (1)..(16): Xaa = Any Amino Acid
CCELCCNXXPAXCTGC

SEQ ID NO: 3615 - protein, 17 aa, Artificial Sequence
  Synthetically generated peptide
  VARIANT (1)..(17): Xaa = Any Amino Acid
CCELCCNXXPAXXCTGC

SEQ ID NO: 3616 - protein, 17 aa, Artificial Sequence
  Synthetically generated peptide
  VARIANT (1)..(17): Xaa = Any Amino Acid
CCELCCNXXPAXCXTGC

SEQ ID NO: 3617 - protein, 17 aa, Artificial Sequence
  Synthetically generated peptide
  VARIANT (1)..(17): Xaa = Any Amino Acid
CCELCCNXXPAXCTXGC

SEQ ID NO: 3618 - protein, 17 aa, Artificial Sequence
  Synthetically generated peptide
  VARIANT (1)..(17): Xaa = Any Amino Acid
CCELCCNXXPAXCTGXC

SEQ ID NO: 3619 - protein, 16 aa, Artificial Sequence
  Synthetically generated peptide
  VARIANT (1)..(16): Xaa = Any Amino Acid
CCELCCNXXPACXTGC

SEQ ID NO: 3620 - protein, 17 aa, Artificial Sequence
  Synthetically generated peptide
  VARIANT (1)..(17): Xaa = Any Amino Acid
CCELCCNXXPACXXTGC

SEQ ID NO: 3621 - protein, 17 aa, Artificial Sequence
  Synthetically generated peptide
  VARIANT (1)..(17): Xaa = Any Amino Acid
CCELCCNXXPACXTXGC

SEQ ID NO: 3622 - protein, 17 aa, Artificial Sequence
  Synthetically generated peptide
  VARIANT (1)..(17): Xaa = Any Amino Acid
CCELCCNXXPACXTGXC

SEQ ID NO: 3623 - protein, 16 aa, Artificial Sequence
  Synthetically generated peptide
  VARIANT (1)..(16): Xaa = Any Amino Acid
CCELCCNXXPACTXGC

SEQ ID NO: 3624 - protein, 17 aa, Artificial Sequence
  Synthetically generated peptide
  VARIANT (1)..(17): Xaa = Any Amino Acid
CCELCCNXXPACTXXGC

SEQ ID NO: 3625 - protein, 17 aa, Artificial Sequence
  Synthetically generated peptide
  VARIANT (1)..(17): Xaa = Any Amino Acid
CCELCCNXXPACTXGXC

SEQ ID NO: 3626 - protein, 16 aa, Artificial Sequence
  Synthetically generated peptide
  VARIANT (1)..(16): Xaa = Any Amino Acid
CCELCCNXXPACTGXC

SEQ ID NO: 3627 - protein, 17 aa, Artificial Sequence
  Synthetically generated peptide
  VARIANT (1)..(17): Xaa = Any Amino Acid
CCELCCNXXPACTGXXC

SEQ ID NO: 3628 - protein, 15 aa, Artificial Sequence
  Synthetically generated peptide
  VARIANT (1)..(15): Xaa = Any Amino Acid
CCELCCNXPXACTGC

SEQ ID NO: 3629 - protein, 16 aa, Artificial Sequence
  Synthetically generated peptide
  VARIANT (1)..(16): Xaa = Any Amino Acid
CCELCCNXPXXACTGC

SEQ ID NO: 3630 - protein, 17 aa, Artificial Sequence
  Synthetically generated peptide
  VARIANT (1)..(17): Xaa = Any Amino Acid
CCELCCNXPXXXACTGC

SEQ ID NO: 3631 - protein, 17 aa, Artificial Sequence
  Synthetically generated peptide
  VARIANT (1)..(17): Xaa = Any Amino Acid
CCELCCNXPXXAXCTGC

SEQ ID NO: 3632 - protein, 17 aa, Artificial Sequence
  Synthetically generated peptide
  VARIANT (1)..(17): Xaa = Any Amino Acid
CCELCCNXPXXACXTGC

SEQ ID NO: 3633 - protein, 17 aa, Artificial Sequence
  Synthetically generated peptide
  VARIANT (1)..(17): Xaa = Any Amino Acid
CCELCCNXPXXACTXGC

SEQ ID NO: 3634 - protein, 17 aa, Artificial Sequence
  Synthetically generated peptide
  VARIANT (1)..(17): Xaa = Any Amino Acid
CCELCCNXPXXACTGXC

SEQ ID NO: 3635 - protein, 16 aa, Artificial Sequence
  Synthetically generated peptide
  VARIANT (1)..(16): Xaa = Any Amino Acid
CCELCCNXPXAXCTGC

SEQ ID NO: 3636 - protein, 17 aa, Artificial Sequence
  Synthetically generated peptide
  VARIANT (1)..(17): Xaa = Any Amino Acid
CCELCCNXPXAXXCTGC

SEQ ID NO: 3637 - protein, 17 aa, Artificial Sequence
  Synthetically generated peptide
  VARIANT (1)..(17): Xaa = Any Amino Acid
CCELCCNXPXAXCXTGC

SEQ ID NO: 3638 - protein, 17 aa, Artificial Sequence
  Synthetically generated peptide
  VARIANT (1)..(17): Xaa = Any Amino Acid
CCELCCNXPXAXCTXGC

SEQ ID NO: 3639 - protein, 17 aa, Artificial Sequence
  Synthetically generated peptide
  VARIANT (1)..(17): Xaa = Any Amino Acid
CCELCCNXPXAXCTGXC

SEQ ID NO: 3640 - protein, 16 aa, Artificial Sequence
  Synthetically generated peptide
  VARIANT (1)..(16): Xaa = Any Amino Acid
CCELCCNXPXACXTGC

SEQ ID NO: 3641 - protein, 17 aa, Artificial Sequence
  Synthetically generated peptide
  VARIANT (1)..(17): Xaa = Any Amino Acid
CCELCCNXPXACXXTGC

SEQ ID NO: 3642 - protein, 17 aa, Artificial Sequence
  Synthetically generated peptide
  VARIANT (1)..(17): Xaa = Any Amino Acid
CCELCCNXPXACXTXGC

SEQ ID NO: 3643 - protein, 17 aa, Artificial Sequence
  Synthetically generated peptide
  VARIANT (1)..(17): Xaa = Any Amino Acid
CCELCCNXPXACXTGXC

SEQ ID NO: 3644 - protein, 16 aa, Artificial Sequence
  Synthetically generated peptide
  VARIANT (1)..(16): Xaa = Any Amino Acid
CCELCCNXPXACTXGC

SEQ ID NO: 3645 - protein, 17 aa, Artificial Sequence
  Synthetically generated peptide
  VARIANT (1)..(17): Xaa = Any Amino Acid
CCELCCNXPXACTXXGC

SEQ ID NO: 3646 - protein, 17 aa, Artificial Sequence
  Synthetically generated peptide
  VARIANT (1)..(17): Xaa = Any Amino Acid
CCELCCNXPXACTXGXC

SEQ ID NO: 3647 - protein, 16 aa, Artificial Sequence
  Synthetically generated peptide
  VARIANT (1)..(16): Xaa = Any Amino Acid
CCELCCNXPXACTGXC

SEQ ID NO: 3648 - protein, 17 aa, Artificial Sequence
  Synthetically generated peptide
  VARIANT (1)..(17): Xaa = Any Amino Acid
CCELCCNXPXACTGXXC

SEQ ID NO: 3649 - protein, 15 aa, Artificial Sequence
  Synthetically generated peptide
  VARIANT (1)..(15): Xaa = Any Amino Acid
CCELCCNXPAXCTGC

SEQ ID NO: 3650 - protein, 16 aa, Artificial Sequence
  Synthetically generated peptide
  VARIANT (1)..(16): Xaa = Any Amino Acid
CCELCCNXPAXXCTGC

SEQ ID NO: 3651 - protein, 17 aa, Artificial Sequence
  Synthetically generated peptide
  VARIANT (1)..(17): Xaa = Any Amino Acid
CCELCCNXPAXXXCTGC

SEQ ID NO: 3652 - protein, 17 aa, Artificial Sequence
  Synthetically generated peptide
  VARIANT (1)..(17): Xaa = Any Amino Acid
CCELCCNXPAXXCXTGC

SEQ ID NO: 3653 - protein, 17 aa, Artificial Sequence
  Synthetically generated peptide
  VARIANT (1)..(17): Xaa = Any Amino Acid
CCELCCNXPAXXCTXGC

SEQ ID NO: 3654 - protein, 17 aa, Artificial Sequence
  Synthetically generated peptide
  VARIANT (1)..(17): Xaa = Any Amino Acid
CCELCCNXPAXXCTGXC

SEQ ID NO: 3655 - protein, 16 aa, Artificial Sequence
  Synthetically generated peptide
  VARIANT (1)..(16): Xaa = Any Amino Acid
CCELCCNXPAXCXTGC

SEQ ID NO: 3656 - protein, 17 aa, Artificial Sequence
  Synthetically generated peptide
  VARIANT (1)..(17): Xaa = Any Amino Acid
CCELCCNXPAXCXXTGC

SEQ ID NO: 3657 - protein, 17 aa, Artificial Sequence
  Synthetically generated peptide
  VARIANT (1)..(17): Xaa = Any Amino Acid
CCELCCNXPAXCXTXGC

SEQ ID NO: 3658 - protein, 17 aa, Artificial Sequence
  Synthetically generated peptide
  VARIANT (1)..(17): Xaa = Any Amino Acid
CCELCCNXPAXCXTGXC

SEQ ID NO: 3659 - protein, 16 aa, Artificial Sequence
  Synthetically generated peptide
  VARIANT (1)..(16): Xaa = Any Amino Acid
CCELCCNXPAXCTXGC

SEQ ID NO: 3660 - protein, 17 aa, Artificial Sequence
  Synthetically generated peptide
  VARIANT (1)..(17): Xaa = Any Amino Acid
CCELCCNXPAXCTXXGC

SEQ ID NO: 3661 - protein, 17 aa, Artificial Sequence
  Synthetically generated peptide
  VARIANT (1)..(17): Xaa = Any Amino Acid
CCELCCNXPAXCTXGXC

SEQ ID NO: 3662 - protein, 16 aa, Artificial Sequence
  Synthetically generated peptide
  VARIANT (1)..(16): Xaa = Any Amino Acid
CCELCCNXPAXCTGXC

SEQ ID NO: 3663 - protein, 17 aa, Artificial Sequence
  Synthetically generated peptide
  VARIANT (1)..(17): Xaa = Any Amino Acid
CCELCCNXPAXCTGXXC

SEQ ID NO: 3664 - protein, 15 aa, Artificial Sequence
  Synthetically generated peptide
  VARIANT (1)..(15): Xaa = Any Amino Acid
CCELCCNXPACXTGC

SEQ ID NO: 3665 - protein, 16 aa, Artificial Sequence
  Synthetically generated peptide
  VARIANT (1)..(16): Xaa = Any Amino Acid
CCELCCNXPACXXTGC

SEQ ID NO: 3666 - protein, 17 aa, Artificial Sequence
  Synthetically generated peptide
  VARIANT (1)..(17): Xaa = Any Amino Acid
CCELCCNXPACXXXTGC

SEQ ID NO: 3667 - protein, 17 aa, Artificial Sequence
  Synthetically generated peptide
  VARIANT (1)..(17): Xaa = Any Amino Acid
CCELCCNXPACXXTXGC

SEQ ID NO: 3668 - protein, 17 aa, Artificial Sequence
  Synthetically generated peptide
  VARIANT (1)..(17): Xaa = Any Amino Acid
CCELCCNXPACXXTGXC

SEQ ID NO: 3669 - protein, 16 aa, Artificial Sequence
  Synthetically generated peptide
  VARIANT (1)..(16): Xaa = Any Amino Acid
CCELCCNXPACXTXGC

SEQ ID NO: 3670 - protein, 17 aa, Artificial Sequence
  Synthetically generated peptide
  VARIANT (1)..(17): Xaa = Any Amino Acid
CCELCCNXPACXTXXGC

SEQ ID NO: 3671 - protein, 17 aa, Artificial Sequence
  Synthetically generated peptide
  VARIANT (1)..(17): Xaa = Any Amino Acid
CCELCCNXPACXTXGXC

SEQ ID NO: 3672 - protein, 16 aa, Artificial Sequence
  Synthetically generated peptide
  VARIANT (1)..(16): Xaa = Any Amino Acid
CCELCCNXPACXTGXC

SEQ ID NO: 3673 - protein, 17 aa, Artificial Sequence
  Synthetically generated peptide
  VARIANT (1)..(17): Xaa = Any Amino Acid
CCELCCNXPACXTGXXC

SEQ ID NO: 3674 - protein, 15 aa, Artificial Sequence
  Synthetically generated peptide
  VARIANT (1)..(15): Xaa = Any Amino Acid
CCELCCNXPACTXGC

SEQ ID NO: 3675 - protein, 16 aa, Artificial Sequence
  Synthetically generated peptide
  VARIANT (1)..(16): Xaa = Any Amino Acid
CCELCCNXPACTXXGC

SEQ ID NO: 3676 - protein, 17 aa, Artificial Sequence
  Synthetically generated peptide
  VARIANT (1)..(17): Xaa = Any Amino Acid
CCELCCNXPACTXXXGC

SEQ ID NO: 3677 - protein, 17 aa, Artificial Sequence
  Synthetically generated peptide
  VARIANT (1)..(17): Xaa = Any Amino Acid
CCELCCNXPACTXXGXC

SEQ ID NO: 3678 - protein, 16 aa, Artificial Sequence
  Synthetically generated peptide
  VARIANT (1)..(16): Xaa = Any Amino Acid
CCELCCNXPACTXGXC

SEQ ID NO: 3679 - protein, 17 aa, Artificial Sequence
  Synthetically generated peptide
  VARIANT (1)..(17): Xaa = Any Amino Acid
CCELCCNXPACTXGXXC

SEQ ID NO: 3680 - protein, 15 aa, Artificial Sequence
  Synthetically generated peptide
  VARIANT (1)..(15): Xaa = Any Amino Acid
CCELCCNXPACTGXC

SEQ ID NO: 3681 - protein, 16 aa, Artificial Sequence
  Synthetically generated peptide
  VARIANT (1)..(16): Xaa = Any Amino Acid
CCELCCNXPACTGXXC

SEQ ID NO: 3682 - protein, 17 aa, Artificial Sequence
  Synthetically generated peptide
  VARIANT (1)..(17): Xaa = Any Amino Acid
CCELCCNXPACTGXXXC

SEQ ID NO: 3683 - protein, 14 aa, Artificial Sequence
  Synthetically generated peptide
  VARIANT (1)..(14): Xaa = Any Amino Acid
CCELCCNPXACTGC

SEQ ID NO: 3684 - protein, 15 aa, Artificial Sequence
  Synthetically generated peptide
  VARIANT (1)..(15): Xaa = Any Amino Acid
CCELCCNPXXACTGC

SEQ ID NO: 3685 - protein, 16 aa, Artificial Sequence
  Synthetically generated peptide
  VARIANT (1)..(16): Xaa = Any Amino Acid
CCELCCNPXXXACTGC

SEQ ID NO: 3686 - protein, 17 aa, Artificial Sequence
  Synthetically generated peptide
  VARIANT (1)..(17): Xaa = Any Amino Acid
CCELCCNPXXXXACTGC

SEQ ID NO: 3687 - protein, 17 aa, Artificial Sequence
  Synthetically generated peptide
  VARIANT (1)..(17): Xaa = Any Amino Acid
CCELCCNPXXXAXCTGC

SEQ ID NO: 3688 - protein, 17 aa, Artificial Sequence
  Synthetically generated peptide
  VARIANT (1)..(17): Xaa = Any Amino Acid
CCELCCNPXXXACXTGC

SEQ ID NO: 3689 - protein, 17 aa, Artificial Sequence
  Synthetically generated peptide
  VARIANT (1)..(17): Xaa = Any Amino Acid
CCELCCNPXXXACTXGC

SEQ ID NO: 3690 - protein, 17 aa, Artificial Sequence
  Synthetically generated peptide
  VARIANT (1)..(17): Xaa = Any Amino Acid
CCELCCNPXXXACTGXC

SEQ ID NO: 3691 - protein, 16 aa, Artificial Sequence
  Synthetically generated peptide
  VARIANT (1)..(16): Xaa = Any Amino Acid
CCELCCNPXXAXCTGC

SEQ ID NO: 3692 - protein, 17 aa, Artificial Sequence
  Synthetically generated peptide
  VARIANT (1)..(17): Xaa = Any Amino Acid
CCELCCNPXXAXXCTGC

SEQ ID NO: 3693 - protein, 17 aa, Artificial Sequence
  Synthetically generated peptide
  VARIANT (1)..(17): Xaa = Any Amino Acid
CCELCCNPXXAXCXTGC

SEQ ID NO: 3694 - protein, 17 aa, Artificial Sequence
  Synthetically generated peptide
  VARIANT (1)..(17): Xaa = Any Amino Acid
CCELCCNPXXAXCTXGC

SEQ ID NO: 3695 - protein, 17 aa, Artificial Sequence
  Synthetically generated peptide
  VARIANT (1)..(17): Xaa = Any Amino Acid
CCELCCNPXXAXCTGXC

SEQ ID NO: 3696 - protein, 16 aa, Artificial Sequence
  Synthetically generated peptide
  VARIANT (1)..(16): Xaa = Any Amino Acid
CCELCCNPXXACXTGC

SEQ ID NO: 3697 - protein, 17 aa, Artificial Sequence
  Synthetically generated peptide
  VARIANT (1)..(17): Xaa = Any Amino Acid
CCELCCNPXXACXXTGC

SEQ ID NO: 3698 - protein, 17 aa, Artificial Sequence
  Synthetically generated peptide
  VARIANT (1)..(17): Xaa = Any Amino Acid
CCELCCNPXXACXTXGC

SEQ ID NO: 3699 - protein, 17 aa, Artificial Sequence
  Synthetically generated peptide
  VARIANT (1)..(17): Xaa = Any Amino Acid
CCELCCNPXXACXTGXC

SEQ ID NO: 3700 - protein, 16 aa, Artificial Sequence
  Synthetically generated peptide
  VARIANT (1)..(16): Xaa = Any Amino Acid
CCELCCNPXXACTXGC

SEQ ID NO: 3701 - protein, 17 aa, Artificial Sequence
  Synthetically generated peptide
  VARIANT (1)..(17): Xaa = Any Amino Acid
CCELCCNPXXACTXXGC

SEQ ID NO: 3702 - protein, 17 aa, Artificial Sequence
  Synthetically generated peptide
  VARIANT (1)..(17): Xaa = Any Amino Acid
CCELCCNPXXACTXGXC

SEQ ID NO: 3703 - protein, 16 aa, Artificial Sequence
  Synthetically generated peptide
  VARIANT (1)..(16): Xaa = Any Amino Acid
CCELCCNPXXACTGXC

SEQ ID NO: 3704 - protein, 17 aa, Artificial Sequence
  Synthetically generated peptide
  VARIANT (1)..(17): Xaa = Any Amino Acid
CCELCCNPXXACTGXXC

SEQ ID NO: 3705 - protein, 15 aa, Artificial Sequence
  Synthetically generated peptide
  VARIANT (1)..(15): Xaa = Any Amino Acid
CCELCCNPXAXCTGC

SEQ ID NO: 3706 - protein, 16 aa, Artificial Sequence
  Synthetically generated peptide
  VARIANT (1)..(16): Xaa = Any Amino Acid
CCELCCNPXAXXCTGC

SEQ ID NO: 3707 - protein, 17 aa, Artificial Sequence
  Synthetically generated peptide
  VARIANT (1)..(17): Xaa = Any Amino Acid
CCELCCNPXAXXXCTGC

SEQ ID NO: 3708 - protein, 17 aa, Artificial Sequence
  Synthetically generated peptide
  VARIANT (1)..(17): Xaa = Any Amino Acid
CCELCCNPXAXXCXTGC

SEQ ID NO: 3709 - protein, 17 aa, Artificial Sequence
  Synthetically generated peptide
  VARIANT (1)..(17): Xaa = Any Amino Acid
CCELCCNPXAXXCTXGC

SEQ ID NO: 3710 - protein, 17 aa, Artificial Sequence
  Synthetically generated peptide
  VARIANT (1)..(17): Xaa = Any Amino Acid
CCELCCNPXAXXCTGXC

SEQ ID NO: 3711 - protein, 16 aa, Artificial Sequence
  Synthetically generated peptide
  VARIANT (1)..(16): Xaa = Any Amino Acid
CCELCCNPXAXCXTGC

SEQ ID NO: 3712 - protein, 17 aa, Artificial Sequence
  Synthetically generated peptide
  VARIANT (1)..(17): Xaa = Any Amino Acid
CCELCCNPXAXCXXTGC

SEQ ID NO: 3713 - protein, 17 aa, Artificial Sequence
  Synthetically generated peptide
  VARIANT (1)..(17): Xaa = Any Amino Acid
CCELCCNPXAXCXTXGC

SEQ ID NO: 3714 - protein, 17 aa, Artificial Sequence
  Synthetically generated peptide
  VARIANT (1)..(17): Xaa = Any Amino Acid
CCELCCNPXAXCXTGXC

SEQ ID NO: 3715 - protein, 16 aa, Artificial Sequence
  Synthetically generated peptide
  VARIANT (1)..(16): Xaa = Any Amino Acid
CCELCCNPXAXCTXGC

SEQ ID NO: 3716 - protein, 17 aa, Artificial Sequence
  Synthetically generated peptide
  VARIANT (1)..(17): Xaa = Any Amino Acid
CCELCCNPXAXCTXXGC

SEQ ID NO: 3717 - protein, 17 aa, Artificial Sequence
  Synthetically generated peptide
  VARIANT (1)..(17): Xaa = Any Amino Acid
CCELCCNPXAXCTXGXC

SEQ ID NO: 3718 - protein, 16 aa, Artificial Sequence
  Synthetically generated peptide
  VARIANT (1)..(16): Xaa = Any Amino Acid
CCELCCNPXAXCTGXC

SEQ ID NO: 3719 - protein, 17 aa, Artificial Sequence
  Synthetically generated peptide
  VARIANT (1)..(17): Xaa = Any Amino Acid
CCELCCNPXAXCTGXXC

SEQ ID NO: 3720 - protein, 15 aa, Artificial Sequence
  Synthetically generated peptide
  VARIANT (1)..(15): Xaa = Any Amino Acid
CCELCCNPXACXTGC

SEQ ID NO: 3721 - protein, 16 aa, Artificial Sequence
  Synthetically generated peptide
  VARIANT (1)..(16): Xaa = Any Amino Acid
CCELCCNPXACXXTGC

SEQ ID NO: 3722 - protein, 17 aa, Artificial Sequence
  Synthetically generated peptide
  VARIANT (1)..(17): Xaa = Any Amino Acid
CCELCCNPXACXXXTGC

SEQ ID NO: 3723 - protein, 17 aa, Artificial Sequence
  Synthetically generated peptide
  VARIANT (1)..(17): Xaa = Any Amino Acid
CCELCCNPXACXXTXGC

SEQ ID NO: 3724 - protein, 17 aa, Artificial Sequence
  Synthetically generated peptide
  VARIANT (1)..(17): Xaa = Any Amino Acid
CCELCCNPXACXXTGXC

SEQ ID NO: 3725 - protein, 16 aa, Artificial Sequence
  Synthetically generated peptide
  VARIANT (1)..(16): Xaa = Any Amino Acid
CCELCCNPXACXTXGC

SEQ ID NO: 3726 - protein, 17 aa, Artificial Sequence
  Synthetically generated peptide
  VARIANT (1)..(17): Xaa = Any Amino Acid
CCELCCNPXACXTXXGC

SEQ ID NO: 3727 - protein, 17 aa, Artificial Sequence
  Synthetically generated peptide
  VARIANT (1)..(17): Xaa = Any Amino Acid
CCELCCNPXACXTXGXC

SEQ ID NO: 3728 - protein, 16 aa, Artificial Sequence
  Synthetically generated peptide
  VARIANT (1)..(16): Xaa = Any Amino Acid
CCELCCNPXACXTGXC

SEQ ID NO: 3729 - protein, 17 aa, Artificial Sequence
  Synthetically generated peptide
  VARIANT (1)..(17): Xaa = Any Amino Acid
CCELCCNPXACXTGXXC

SEQ ID NO: 3730 - protein, 15 aa, Artificial Sequence
  Synthetically generated peptide
  VARIANT (1)..(15): Xaa = Any Amino Acid
CCELCCNPXACTXGC

SEQ ID NO: 3731 - protein, 16 aa, Artificial Sequence
  Synthetically generated peptide
  VARIANT (1)..(16): Xaa = Any Amino Acid
CCELCCNPXACTXXGC

SEQ ID NO: 3732 - protein, 17 aa, Artificial Sequence
  Synthetically generated peptide
  VARIANT (1)..(17): Xaa = Any Amino Acid
CCELCCNPXACTXXXGC

SEQ ID NO: 3733 - protein, 17 aa, Artificial Sequence
  Synthetically generated peptide
  VARIANT (1)..(17): Xaa = Any Amino Acid
CCELCCNPXACTXXGXC

SEQ ID NO: 3734 - protein, 16 aa, Artificial Sequence
  Synthetically generated peptide
  VARIANT (1)..(16): Xaa = Any Amino Acid
CCELCCNPXACTXGXC

SEQ ID NO: 3735 - protein, 17 aa, Artificial Sequence
  Synthetically generated peptide
  VARIANT (1)..(17): Xaa = Any Amino Acid
CCELCCNPXACTXGXXC

SEQ ID NO: 3736 - protein, 15 aa, Artificial Sequence
  Synthetically generated peptide
  VARIANT (1)..(15): Xaa = Any Amino Acid
CCELCCNPXACTGXC

SEQ ID NO: 3737 - protein, 16 aa, Artificial Sequence
  Synthetically generated peptide
  VARIANT (1)..(16): Xaa = Any Amino Acid
CCELCCNPXACTGXXC

SEQ ID NO: 3738 - protein, 17 aa, Artificial Sequence
  Synthetically generated peptide
  VARIANT (1)..(17): Xaa = Any Amino Acid
CCELCCNPXACTGXXXC

SEQ ID NO: 3739 - protein, 14 aa, Artificial Sequence
  Synthetically generated peptide
  VARIANT (1)..(14): Xaa = Any Amino Acid
CCELCCNPAXCTGC

SEQ ID NO: 3740 - protein, 15 aa, Artificial Sequence
  Synthetically generated peptide
  VARIANT (1)..(15): Xaa = Any Amino Acid
CCELCCNPAXXCTGC

SEQ ID NO: 3741 - protein, 16 aa, Artificial Sequence
  Synthetically generated peptide
  VARIANT (1)..(16): Xaa = Any Amino Acid
CCELCCNPAXXXCTGC

SEQ ID NO: 3742 - protein, 17 aa, Artificial Sequence
  Synthetically generated peptide
  VARIANT (1)..(17): Xaa = Any Amino Acid
CCELCCNPAXXXXCTGC

SEQ ID NO: 3743 - protein, 17 aa, Artificial Sequence
  Synthetically generated peptide
  VARIANT (1)..(17): Xaa = Any Amino Acid
CCELCCNPAXXXCXTGC

SEQ ID NO: 3744 - protein, 17 aa, Artificial Sequence
  Synthetically generated peptide
  VARIANT (1)..(17): Xaa = Any Amino Acid
CCELCCNPAXXXCTXGC

SEQ ID NO: 3745 - protein, 17 aa, Artificial Sequence
  Synthetically generated peptide
  VARIANT (1)..(17): Xaa = Any Amino Acid
CCELCCNPAXXXCTGXC

SEQ ID NO: 3746 - protein, 16 aa, Artificial Sequence
  Synthetically generated peptide
  VARIANT (1)..(16): Xaa = Any Amino Acid
CCELCCNPAXXCXTGC

SEQ ID NO: 3747 - protein, 17 aa, Artificial Sequence
  Synthetically generated peptide
  VARIANT (1)..(17): Xaa = Any Amino Acid
CCELCCNPAXXCXXTGC

SEQ ID NO: 3748 - protein, 17 aa, Artificial Sequence
  Synthetically generated peptide
  VARIANT (1)..(17): Xaa = Any Amino Acid
CCELCCNPAXXCXTXGC

SEQ ID NO: 3749 - protein, 17 aa, Artificial Sequence
  Synthetically generated peptide
  VARIANT (1)..(17): Xaa = Any Amino Acid
CCELCCNPAXXCXTGXC

SEQ ID NO: 3750 - protein, 16 aa, Artificial Sequence
  Synthetically generated peptide
  VARIANT (1)..(16): Xaa = Any Amino Acid
CCELCCNPAXXCTXGC

SEQ ID NO: 3751 - protein, 17 aa, Artificial Sequence
  Synthetically generated peptide
  VARIANT (1)..(17): Xaa = Any Amino Acid
CCELCCNPAXXCTXXGC

SEQ ID NO: 3752 - protein, 17 aa, Artificial Sequence
  Synthetically generated peptide
  VARIANT (1)..(17): Xaa = Any Amino Acid
CCELCCNPAXXCTXGXC

SEQ ID NO: 3753 - protein, 16 aa, Artificial Sequence
  Synthetically generated peptide
  VARIANT (1)..(16): Xaa = Any Amino Acid
CCELCCNPAXXCTGXC

SEQ ID NO: 3754 - protein, 17 aa, Artificial Sequence
  Synthetically generated peptide
  VARIANT (1)..(17): Xaa = Any Amino Acid
CCELCCNPAXXCTGXXC

SEQ ID NO: 3755 - protein, 15 aa, Artificial Sequence
  Synthetically generated peptide
  VARIANT (1)..(15): Xaa = Any Amino Acid
CCELCCNPAXCXTGC

SEQ ID NO: 3756 - protein, 16 aa, Artificial Sequence
  Synthetically generated peptide
  VARIANT (1)..(16): Xaa = Any Amino Acid
CCELCCNPAXCXXTGC

SEQ ID NO: 3757 - protein, 17 aa, Artificial Sequence
  Synthetically generated peptide
  VARIANT (1)..(17): Xaa = Any Amino Acid
CCELCCNPAXCXXXTGC

SEQ ID NO: 3758 - protein, 17 aa, Artificial Sequence
  Synthetically generated peptide
  VARIANT (1)..(17): Xaa = Any Amino Acid
CCELCCNPAXCXXTXGC

SEQ ID NO: 3759 - protein, 17 aa, Artificial Sequence
  Synthetically generated peptide
  VARIANT (1)..(17): Xaa = Any Amino Acid
CCELCCNPAXCXXTGXC

SEQ ID NO: 3760 - protein, 16 aa, Artificial Sequence
  Synthetically generated peptide
  VARIANT (1)..(16): Xaa = Any Amino Acid
CCELCCNPAXCXTXGC

SEQ ID NO: 3761 - protein, 17 aa, Artificial Sequence
  Synthetically generated peptide
  VARIANT (1)..(17): Xaa = Any Amino Acid
CCELCCNPAXCXTXXGC

SEQ ID NO: 3762 - protein, 17 aa, Artificial Sequence
  Synthetically generated peptide
  VARIANT (1)..(17): Xaa = Any Amino Acid
CCELCCNPAXCXTXGXC

SEQ ID NO: 3763 - protein, 16 aa, Artificial Sequence
  Synthetically generated peptide
  VARIANT (1)..(16): Xaa = Any Amino Acid
CCELCCNPAXCXTGXC

SEQ ID NO: 3764 - protein, 17 aa, Artificial Sequence
  Synthetically generated peptide
  VARIANT (1)..(17): Xaa = Any Amino Acid
CCELCCNPAXCXTGXXC

SEQ ID NO: 3765 - protein, 15 aa, Artificial Sequence
  Synthetically generated peptide
  VARIANT (1)..(15): Xaa = Any Amino Acid
CCELCCNPAXCTXGC

SEQ ID NO: 3766 - protein, 16 aa, Artificial Sequence
  Synthetically generated peptide
  VARIANT (1)..(16): Xaa = Any Amino Acid
CCELCCNPAXCTXXGC

SEQ ID NO: 3767 - protein, 17 aa, Artificial Sequence
  Synthetically generated peptide
  VARIANT (1)..(17): Xaa = Any Amino Acid
CCELCCNPAXCTXXXGC

SEQ ID NO: 3768 - protein, 17 aa, Artificial Sequence
  Synthetically generated peptide
  VARIANT (1)..(17): Xaa = Any Amino Acid
CCELCCNPAXCTXXGXC

SEQ ID NO: 3769 - protein, 16 aa, Artificial Sequence
  Synthetically generated peptide
  VARIANT (1)..(16): Xaa = Any Amino Acid
CCELCCNPAXCTXGXC

SEQ ID NO: 3770 - protein, 17 aa, Artificial Sequence
  Synthetically generated peptide
  VARIANT (1)..(17): Xaa = Any Amino Acid
CCELCCNPAXCTXGXXC

SEQ ID NO: 3771 - protein, 15 aa, Artificial Sequence
  Synthetically generated peptide
  VARIANT (1)..(15): Xaa = Any Amino Acid
CCELCCNPAXCTGXC

SEQ ID NO: 3772 - protein, 16 aa, Artificial Sequence
  Synthetically generated peptide
  VARIANT (1)..(16): Xaa = Any Amino Acid
CCELCCNPAXCTGXXC

SEQ ID NO: 3773 - protein, 17 aa, Artificial Sequence
  Synthetically generated peptide
  VARIANT (1)..(17): Xaa = Any Amino Acid
CCELCCNPAXCTGXXXC

SEQ ID NO: 3774 - protein, 14 aa, Artificial Sequence
  Synthetically generated peptide
  VARIANT (1)..(14): Xaa = Any Amino Acid
CCELCCNPACXTGC

SEQ ID NO: 3775 - protein, 15 aa, Artificial Sequence
  Synthetically generated peptide
  VARIANT (1)..(15): Xaa = Any Amino Acid
CCELCCNPACXXTGC

SEQ ID NO: 3776 - protein, 16 aa, Artificial Sequence
  Synthetically generated peptide
  VARIANT (1)..(16): Xaa = Any Amino Acid
CCELCCNPACXXXTGC

SEQ ID NO: 3777 - protein, 17 aa, Artificial Sequence
  Synthetically generated peptide
  VARIANT (1)..(17): Xaa = Any Amino Acid
CCELCCNPACXXXXTGC

SEQ ID NO: 3778 - protein, 17 aa, Artificial Sequence
  Synthetically generated peptide
  VARIANT (1)..(17): Xaa = Any Amino Acid
CCELCCNPACXXXTXGC

SEQ ID NO: 3779 - protein, 17 aa, Artificial Sequence
  Synthetically generated peptide
  VARIANT (1)..(17): Xaa = Any Amino Acid
CCELCCNPACXXXTGXC

SEQ ID NO: 3780 - protein, 16 aa, Artificial Sequence
  Synthetically generated peptide
  VARIANT (1)..(16): Xaa = Any Amino Acid
CCELCCNPACXXTXGC

SEQ ID NO: 3781 - protein, 17 aa, Artificial Sequence
  Synthetically generated peptide
  VARIANT (1)..(17): Xaa = Any Amino Acid
CCELCCNPACXXTXXGC

SEQ ID NO: 3782 - protein, 17 aa, Artificial Sequence
  Synthetically generated peptide
  VARIANT (1)..(17): Xaa = Any Amino Acid
CCELCCNPACXXTXGXC

SEQ ID NO: 3783 - protein, 16 aa, Artificial Sequence
  Synthetically generated peptide
  VARIANT (1)..(16): Xaa = Any Amino Acid
CCELCCNPACXXTGXC

SEQ ID NO: 3784 - protein, 17 aa, Artificial Sequence
  Synthetically generated peptide
  VARIANT (1)..(17): Xaa = Any Amino Acid
CCELCCNPACXXTGXXC

SEQ ID NO: 3785 - protein, 15 aa, Artificial Sequence
  Synthetically generated peptide
  VARIANT (1)..(15): Xaa = Any Amino Acid
CCELCCNPACXTXGC

SEQ ID NO: 3786 - protein, 16 aa, Artificial Sequence
  Synthetically generated peptide
  VARIANT (1)..(16): Xaa = Any Amino Acid
CCELCCNPACXTXXGC

SEQ ID NO: 3787 - protein, 17 aa, Artificial Sequence
  Synthetically generated peptide
  VARIANT (1)..(17): Xaa = Any Amino Acid
CCELCCNPACXTXXXGC

SEQ ID NO: 3788 - protein, 17 aa, Artificial Sequence
  Synthetically generated peptide
  VARIANT (1)..(17): Xaa = Any Amino Acid
CCELCCNPACXTXXGXC

SEQ ID NO: 3789 - protein, 16 aa, Artificial Sequence
  Synthetically generated peptide
  VARIANT (1)..(16): Xaa = Any Amino Acid
CCELCCNPACXTXGXC

SEQ ID NO: 3790 - protein, 17 aa, Artificial Sequence
  Synthetically generated peptide
  VARIANT (1)..(17): Xaa = Any Amino Acid
CCELCCNPACXTXGXXC

SEQ ID NO: 3791 - protein, 15 aa, Artificial Sequence
  Synthetically generated peptide
  VARIANT (1)..(15): Xaa = Any Amino Acid
CCELCCNPACXTGXC

SEQ ID NO: 3792 - protein, 16 aa, Artificial Sequence
  Synthetically generated peptide
  VARIANT (1)..(16): Xaa = Any Amino Acid
CCELCCNPACXTGXXC

SEQ ID NO: 3793 - protein, 17 aa, Artificial Sequence
  Synthetically generated peptide
  VARIANT (1)..(17): Xaa = Any Amino Acid
CCELCCNPACXTGXXXC

SEQ ID NO: 3794 - protein, 14 aa, Artificial Sequence
  Synthetically generated peptide
  VARIANT (1)..(14): Xaa = Any Amino Acid
CCELCCNPACTXGC

SEQ ID NO: 3795 - protein, 15 aa, Artificial Sequence
  Synthetically generated peptide
  VARIANT (1)..(15): Xaa = Any Amino Acid
CCELCCNPACTXXGC

SEQ ID NO: 3796 - protein, 16 aa, Artificial Sequence
  Synthetically generated peptide
  VARIANT (1)..(16): Xaa = Any Amino Acid
CCELCCNPACTXXXGC

SEQ ID NO: 3797 - protein, 17 aa, Artificial Sequence
  Synthetically generated peptide
  VARIANT (1)..(17): Xaa = Any Amino Acid
CCELCCNPACTXXXXGC

SEQ ID NO: 3798 - protein, 17 aa, Artificial Sequence
  Synthetically generated peptide
  VARIANT (1)..(17): Xaa = Any Amino Acid
CCELCCNPACTXXXGXC

SEQ ID NO: 3799 - protein, 16 aa, Artificial Sequence
  Synthetically generated peptide
  VARIANT (1)..(16): Xaa = Any Amino Acid
CCELCCNPACTXXGXC

SEQ ID NO: 3800 - protein, 17 aa, Artificial Sequence
  Synthetically generated peptide
  VARIANT (1)..(17): Xaa = Any Amino Acid
CCELCCNPACTXXGXXC

SEQ ID NO: 3801 - protein, 15 aa, Artificial Sequence
  Synthetically generated peptide
  VARIANT (1)..(15): Xaa = Any Amino Acid
CCELCCNPACTXGXC

SEQ ID NO: 3802 - protein, 16 aa, Artificial Sequence
  Synthetically generated peptide
  VARIANT (1)..(16): Xaa = Any Amino Acid
CCELCCNPACTXGXXC

SEQ ID NO: 3803 - protein, 17 aa, Artificial Sequence
  Synthetically generated peptide
  VARIANT (1)..(17): Xaa = Any Amino Acid
CCELCCNPACTXGXXXC

SEQ ID NO: 3804 - protein, 14 aa, Artificial Sequence
  Synthetically generated peptide
  VARIANT (1)..(14): Xaa = Any Amino Acid
CCELCCNPACTGXC

SEQ ID NO: 3805 - protein, 15 aa, Artificial Sequence
  Synthetically generated peptide
  VARIANT (1)..(15): Xaa = Any Amino Acid
CCELCCNPACTGXXC

SEQ ID NO: 3806 - protein, 16 aa, Artificial Sequence
  Synthetically generated peptide
  VARIANT (1)..(16): Xaa = Any Amino Acid
CCELCCNPACTGXXXC

SEQ ID NO: 3807 - protein, 17 aa, Artificial Sequence
  Synthetically generated peptide
  VARIANT (1)..(17): Xaa = Any Amino Acid
CCELCCNPACTGXXXXC

SEQ ID NO: 3808 - protein, 14 aa, Artificial Sequence
  Synthetically generated peptide
  VARIANT (1)..(14): Xaa = Any Amino Acid
CCXEWCCNPACTGC

SEQ ID NO: 3809 - protein, 15 aa, Artificial Sequence
  Synthetically generated peptide
  VARIANT (1)..(15): Xaa = Any Amino Acid
CCXXEWCCNPACTGC

SEQ ID NO: 3810 - protein, 16 aa, Artificial Sequence
  Synthetically generated peptide
  VARIANT (1)..(16): Xaa = Any Amino Acid
CCXXXEWCCNPACTGC

SEQ ID NO: 3811 - protein, 17 aa, Artificial Sequence
  Synthetically generated peptide
  VARIANT (1)..(17): Xaa = Any Amino Acid
CCXXXXEWCCNPACTGC

SEQ ID NO: 3812 - protein, 17 aa, Artificial Sequence
  Synthetically generated peptide
  VARIANT (1)..(17): Xaa = Any Amino Acid
CCXXXEXWCCNPACTGC

SEQ ID NO: 3813 - protein, 17 aa, Artificial Sequence
  Synthetically generated peptide
  VARIANT (1)..(17): Xaa = Any Amino Acid
CCXXXEWXCCNPACTGC

SEQ ID NO: 3814 - protein, 17 aa, Artificial Sequence
  Synthetically generated peptide
  VARIANT (1)..(17): Xaa = Any Amino Acid
CCXXXEWCCXNPACTGC

SEQ ID NO: 3815 - protein, 17 aa, Artificial Sequence
  Synthetically generated peptide
  VARIANT (1)..(17): Xaa = Any Amino Acid
CCXXXEWCCNXPACTGC

SEQ ID NO: 3816 - protein, 17 aa, Artificial Sequence
  Synthetically generated peptide
  VARIANT (1)..(17): Xaa = Any Amino Acid
CCXXXEWCCNPXACTGC

SEQ ID NO: 3817 - protein, 17 aa, Artificial Sequence
  Synthetically generated peptide
  VARIANT (1)..(17): Xaa = Any Amino Acid
CCXXXEWCCNPAXCTGC

SEQ ID NO: 3818 - protein, 17 aa, Artificial Sequence
  Synthetically generated peptide
  VARIANT (1)..(17): Xaa = Any Amino Acid
CCXXXEWCCNPACXTGC

SEQ ID NO: 3819 - protein, 17 aa, Artificial Sequence
  Synthetically generated peptide
  VARIANT (1)..(17): Xaa = Any Amino Acid
CCXXXEWCCNPACTXGC

SEQ ID NO: 3820 - protein, 17 aa, Artificial Sequence
  Synthetically generated peptide
  VARIANT (1)..(17): Xaa = Any Amino Acid
CCXXXEWCCNPACTGXC

SEQ ID NO: 3821 - protein, 16 aa, Artificial Sequence
  Synthetically generated peptide
  VARIANT (1)..(16): Xaa = Any Amino Acid
CCXXEXWCCNPACTGC

SEQ ID NO: 3822 - protein, 17 aa, Artificial Sequence
  Synthetically generated peptide
  VARIANT (1)..(17): Xaa = Any Amino Acid
CCXXEXXWCCNPACTGC

SEQ ID NO: 3823 - protein, 17 aa, Artificial Sequence
  Synthetically generated peptide
  VARIANT (1)..(17): Xaa = Any Amino Acid
CCXXEXWXCCNPACTGC

SEQ ID NO: 3824 - protein, 17 aa, Artificial Sequence
  Synthetically generated peptide
  VARIANT (1)..(17): Xaa = Any Amino Acid
CCXXEXWCCXNPACTGC

SEQ ID NO: 3825 - protein, 17 aa, Artificial Sequence
  Synthetically generated peptide
  VARIANT (1)..(17): Xaa = Any Amino Acid
CCXXEXWCCNXPACTGC

SEQ ID NO: 3826 - protein, 17 aa, Artificial Sequence
  Synthetically generated peptide
  VARIANT (1)..(17): Xaa = Any Amino Acid
CCXXEXWCCNPXACTGC

SEQ ID NO: 3827 - protein, 17 aa, Artificial Sequence
  Synthetically generated peptide
  VARIANT (1)..(17): Xaa = Any Amino Acid
CCXXEXWCCNPAXCTGC

SEQ ID NO: 3828 - protein, 17 aa, Artificial Sequence
  Synthetically generated peptide
  VARIANT (1)..(17): Xaa = Any Amino Acid
CCXXEXWCCNPACXTGC

SEQ ID NO: 3829 - protein, 17 aa, Artificial Sequence
  Synthetically generated peptide
  VARIANT (1)..(17): Xaa = Any Amino Acid
CCXXEXWCCNPACTXGC

SEQ ID NO: 3830 - protein, 17 aa, Artificial Sequence
  Synthetically generated peptide
  VARIANT (1)..(17): Xaa = Any Amino Acid
CCXXEXWCCNPACTGXC

SEQ ID NO: 3831 - protein, 16 aa, Artificial Sequence
  Synthetically generated peptide
  VARIANT (1)..(16): Xaa = Any Amino Acid
CCXXEWXCCNPACTGC

SEQ ID NO: 3832 - protein, 17 aa, Artificial Sequence
  Synthetically generated peptide
  VARIANT (1)..(17): Xaa = Any Amino Acid
CCXXEWXXCCNPACTGC

SEQ ID NO: 3833 - protein, 17 aa, Artificial Sequence
  Synthetically generated peptide
  VARIANT (1)..(17): Xaa = Any Amino Acid
CCXXEWXCCXNPACTGC

SEQ ID NO: 3834 - protein, 17 aa, Artificial Sequence
  Synthetically generated peptide
  VARIANT (1)..(17): Xaa = Any Amino Acid
CCXXEWXCCNXPACTGC

SEQ ID NO: 3835 - protein, 17 aa, Artificial Sequence
  Synthetically generated peptide
  VARIANT (1)..(17): Xaa = Any Amino Acid
CCXXEWXCCNPXACTGC

SEQ ID NO: 3836 - protein, 17 aa, Artificial Sequence
  Synthetically generated peptide
  VARIANT (1)..(17): Xaa = Any Amino Acid
CCXXEWXCCNPAXCTGC

SEQ ID NO: 3837 - protein, 17 aa, Artificial Sequence
  Synthetically generated peptide
  VARIANT (1)..(17): Xaa = Any Amino Acid
CCXXEWXCCNPACXTGC

SEQ ID NO: 3838 - protein, 17 aa, Artificial Sequence
  Synthetically generated peptide
  VARIANT (1)..(17): Xaa = Any Amino Acid
CCXXEWXCCNPACTXGC

SEQ ID NO: 3839 - protein, 17 aa, Artificial Sequence
  Synthetically generated peptide
  VARIANT (1)..(17): Xaa = Any Amino Acid
CCXXEWXCCNPACTGXC

SEQ ID NO: 3840 - protein, 16 aa, Artificial Sequence
  Synthetically generated peptide
  VARIANT (1)..(16): Xaa = Any Amino Acid
CCXXEWCCXNPACTGC

SEQ ID NO: 3841 - protein, 17 aa, Artificial Sequence
  Synthetically generated peptide
  VARIANT (1)..(17): Xaa = Any Amino Acid
CCXXEWCCXXNPACTGC

SEQ ID NO: 3842 - protein, 17 aa, Artificial Sequence
  Synthetically generated peptide
  VARIANT (1)..(17): Xaa = Any Amino Acid
CCXXEWCCXNXPACTGC

SEQ ID NO: 3843 - protein, 17 aa, Artificial Sequence
  Synthetically generated peptide
  VARIANT (1)..(17): Xaa = Any Amino Acid
CCXXEWCCXNPXACTGC

SEQ ID NO: 3844 - protein, 17 aa, Artificial Sequence
  Synthetically generated peptide
  VARIANT (1)..(17): Xaa = Any Amino Acid
CCXXEWCCXNPAXCTGC

SEQ ID NO: 3845 - protein, 17 aa, Artificial Sequence
  Synthetically generated peptide
  VARIANT (1)..(17): Xaa = Any Amino Acid
CCXXEWCCXNPACXTGC

SEQ ID NO: 3846 - protein, 17 aa, Artificial Sequence
  Synthetically generated peptide
  VARIANT (1)..(17): Xaa = Any Amino Acid
CCXXEWCCXNPACTXGC

SEQ ID NO: 3847 - protein, 17 aa, Artificial Sequence
  Synthetically generated peptide
  VARIANT (1)..(17): Xaa = Any Amino Acid
CCXXEWCCXNPACTGXC

SEQ ID NO: 3848 - protein, 16 aa, Artificial Sequence
  Synthetically generated peptide
  VARIANT (1)..(16): Xaa = Any Amino Acid
CCXXEWCCNXPACTGC

SEQ ID NO: 3849 - protein, 17 aa, Artificial Sequence
  Synthetically generated peptide
  VARIANT (1)..(17): Xaa = Any Amino Acid
CCXXEWCCNXXPACTGC

SEQ ID NO: 3850 - protein, 17 aa, Artificial Sequence
  Synthetically generated peptide
  VARIANT (1)..(17): Xaa = Any Amino Acid
CCXXEWCCNXPXACTGC

SEQ ID NO: 3851 - protein, 17 aa, Artificial Sequence
  Synthetically generated peptide
  VARIANT (1)..(17): Xaa = Any Amino Acid
CCXXEWCCNXPAXCTGC

SEQ ID NO: 3852 - protein, 17 aa, Artificial Sequence
  Synthetically generated peptide
  VARIANT (1)..(17): Xaa = Any Amino Acid
CCXXEWCCNXPACXTGC

SEQ ID NO: 3853 - protein, 17 aa, Artificial Sequence
  Synthetically generated peptide
  VARIANT (1)..(17): Xaa = Any Amino Acid
CCXXEWCCNXPACTXGC

SEQ ID NO: 3854 - protein, 17 aa, Artificial Sequence
  Synthetically generated peptide
  VARIANT (1)..(17): Xaa = Any Amino Acid
CCXXEWCCNXPACTGXC

SEQ ID NO: 3855 - protein, 16 aa, Artificial Sequence
  Synthetically generated peptide
  VARIANT (1)..(16): Xaa = Any Amino Acid
CCXXEWCCNPXACTGC

SEQ ID NO: 3856 - protein, 17 aa, Artificial Sequence
  Synthetically generated peptide
  VARIANT (1)..(17): Xaa = Any Amino Acid
CCXXEWCCNPXXACTGC

SEQ ID NO: 3857 - protein, 17 aa, Artificial Sequence
  Synthetically generated peptide
  VARIANT (1)..(17): Xaa = Any Amino Acid
CCXXEWCCNPXAXCTGC

SEQ ID NO: 3858 - protein, 17 aa, Artificial Sequence
  Synthetically generated peptide
  VARIANT (1)..(17): Xaa = Any Amino Acid
CCXXEWCCNPXACXTGC

SEQ ID NO: 3859 - protein, 17 aa, Artificial Sequence
  Synthetically generated peptide
  VARIANT (1)..(17): Xaa = Any Amino Acid
CCXXEWCCNPXACTXGC

SEQ ID NO: 3860 - protein, 17 aa, Artificial Sequence
  Synthetically generated peptide
  VARIANT (1)..(17): Xaa = Any Amino Acid
CCXXEWCCNPXACTGXC

SEQ ID NO: 3861 - protein, 16 aa, Artificial Sequence
  Synthetically generated peptide
  VARIANT (1)..(16): Xaa = Any Amino Acid
CCXXEWCCNPAXCTGC

SEQ ID NO: 3862 - protein, 17 aa, Artificial Sequence
  Synthetically generated peptide
  VARIANT (1)..(17): Xaa = Any Amino Acid
CCXXEWCCNPAXXCTGC

SEQ ID NO: 3863 - protein, 17 aa, Artificial Sequence
  Synthetically generated peptide
  VARIANT (1)..(17): Xaa = Any Amino Acid
CCXXEWCCNPAXCXTGC

SEQ ID NO: 3864 - protein, 17 aa, Artificial Sequence
  Synthetically generated peptide
  VARIANT (1)..(17): Xaa = Any Amino Acid
CCXXEWCCNPAXCTXGC

SEQ ID NO: 3865 - protein, 17 aa, Artificial Sequence
  Synthetically generated peptide
  VARIANT (1)..(17): Xaa = Any Amino Acid
CCXXEWCCNPAXCTGXC

SEQ ID NO: 3866 - protein, 16 aa, Artificial Sequence
  Synthetically generated peptide
  VARIANT (1)..(16): Xaa = Any Amino Acid
CCXXEWCCNPACXTGC

SEQ ID NO: 3867 - protein, 17 aa, Artificial Sequence
  Synthetically generated peptide
  VARIANT (1)..(17): Xaa = Any Amino Acid
CCXXEWCCNPACXXTGC

SEQ ID NO: 3868 - protein, 17 aa, Artificial Sequence
  Synthetically generated peptide
  VARIANT (1)..(17): Xaa = Any Amino Acid
CCXXEWCCNPACXTXGC

SEQ ID NO: 3869 - protein, 17 aa, Artificial Sequence
  Synthetically generated peptide
  VARIANT (1)..(17): Xaa = Any Amino Acid
CCXXEWCCNPACXTGXC

SEQ ID NO: 3870 - protein, 16 aa, Artificial Sequence
  Synthetically generated peptide
  VARIANT (1)..(16): Xaa = Any Amino Acid
CCXXEWCCNPACTXGC

SEQ ID NO: 3871 - protein, 17 aa, Artificial Sequence
  Synthetically generated peptide
  VARIANT (1)..(17): Xaa = Any Amino Acid
CCXXEWCCNPACTXXGC

SEQ ID NO: 3872 - protein, 17 aa, Artificial Sequence
  Synthetically generated peptide
  VARIANT (1)..(17): Xaa = Any Amino Acid
CCXXEWCCNPACTXGXC

SEQ ID NO: 3873 - protein, 16 aa, Artificial Sequence
  Synthetically generated peptide
  VARIANT (1)..(16): Xaa = Any Amino Acid
CCXXEWCCNPACTGXC

SEQ ID NO: 3874 - protein, 17 aa, Artificial Sequence
  Synthetically generated peptide
  VARIANT (1)..(17): Xaa = Any Amino Acid
CCXXEWCCNPACTGXXC

SEQ ID NO: 3875 - protein, 15 aa, Artificial Sequence
  Synthetically generated peptide
  VARIANT (1)..(15): Xaa = Any Amino Acid
CCXEXWCCNPACTGC

SEQ ID NO: 3876 - protein, 16 aa, Artificial Sequence
  Synthetically generated peptide
  VARIANT (1)..(16): Xaa = Any Amino Acid
CCXEXXWCCNPACTGC

SEQ ID NO: 3877 - protein, 17 aa, Artificial Sequence
  Synthetically generated peptide
  VARIANT (1)..(17): Xaa = Any Amino Acid
CCXEXXXWCCNPACTGC

SEQ ID NO: 3878 - protein, 17 aa, Artificial Sequence
  Synthetically generated peptide
  VARIANT (1)..(17): Xaa = Any Amino Acid
CCXEXXWXCCNPACTGC

SEQ ID NO: 3879 - protein, 17 aa, Artificial Sequence
  Synthetically generated peptide
  VARIANT (1)..(17): Xaa = Any Amino Acid
CCXEXXWCCXNPACTGC

SEQ ID NO: 3880 - protein, 17 aa, Artificial Sequence
  Synthetically generated peptide
  VARIANT (1)..(17): Xaa = Any Amino Acid
CCXEXXWCCNXPACTGC

SEQ ID NO: 3881 - protein, 17 aa, Artificial Sequence
  Synthetically generated peptide
  VARIANT (1)..(17): Xaa = Any Amino Acid
CCXEXXWCCNPXACTGC

SEQ ID NO: 3882 - protein, 17 aa, Artificial Sequence
  Synthetically generated peptide
  VARIANT (1)..(17): Xaa = Any Amino Acid
CCXEXXWCCNPAXCTGC

SEQ ID NO: 3883 - protein, 17 aa, Artificial Sequence
  Synthetically generated peptide
  VARIANT (1)..(17): Xaa = Any Amino Acid
CCXEXXWCCNPACXTGC

SEQ ID NO: 3884 - protein, 17 aa, Artificial Sequence
  Synthetically generated peptide
  VARIANT (1)..(17): Xaa = Any Amino Acid
CCXEXXWCCNPACTXGC

SEQ ID NO: 3885 - protein, 17 aa, Artificial Sequence
  Synthetically generated peptide
  VARIANT (1)..(17): Xaa = Any Amino Acid
CCXEXXWCCNPACTGXC

SEQ ID NO: 3886 - protein, 16 aa, Artificial Sequence
  Synthetically generated peptide
  VARIANT (1)..(16): Xaa = Any Amino Acid
CCXEXWXCCNPACTGC

SEQ ID NO: 3887 - protein, 17 aa, Artificial Sequence
  Synthetically generated peptide
  VARIANT (1)..(17): Xaa = Any Amino Acid
CCXEXWXXCCNPACTGC

SEQ ID NO: 3888 - protein, 17 aa, Artificial Sequence
  Synthetically generated peptide
  VARIANT (1)..(17): Xaa = Any Amino Acid
CCXEXWXCCXNPACTGC

SEQ ID NO: 3889 - protein, 17 aa, Artificial Sequence
  Synthetically generated peptide
  VARIANT (1)..(17): Xaa = Any Amino Acid
CCXEXWXCCNXPACTGC

SEQ ID NO: 3890 - protein, 17 aa, Artificial Sequence
  Synthetically generated peptide
  VARIANT (1)..(17): Xaa = Any Amino Acid
CCXEXWXCCNPXACTGC

SEQ ID NO: 3891 - protein, 17 aa, Artificial Sequence
  Synthetically generated peptide
  VARIANT (1)..(17): Xaa = Any Amino Acid
CCXEXWXCCNPAXCTGC

SEQ ID NO: 3892 - protein, 17 aa, Artificial Sequence
  Synthetically generated peptide
  VARIANT (1)..(17): Xaa = Any Amino Acid
CCXEXWXCCNPACXTGC

SEQ ID NO: 3893 - protein, 17 aa, Artificial Sequence
  Synthetically generated peptide
  VARIANT (1)..(17): Xaa = Any Amino Acid
CCXEXWXCCNPACTXGC

SEQ ID NO: 3894 - protein, 17 aa, Artificial Sequence
  Synthetically generated peptide
  VARIANT (1)..(17): Xaa = Any Amino Acid
CCXEXWXCCNPACTGXC

SEQ ID NO: 3895 - protein, 16 aa, Artificial Sequence
  Synthetically generated peptide
  VARIANT (1)..(16): Xaa = Any Amino Acid
CCXEXWCCXNPACTGC

SEQ ID NO: 3896 - protein, 17 aa, Artificial Sequence
  Synthetically generated peptide
  VARIANT (1)..(17): Xaa = Any Amino Acid
CCXEXWCCXXNPACTGC

SEQ ID NO: 3897 - protein, 17 aa, Artificial Sequence
  Synthetically generated peptide
  VARIANT (1)..(17): Xaa = Any Amino Acid
CCXEXWCCXNXPACTGC

SEQ ID NO: 3898 - protein, 17 aa, Artificial Sequence
  Synthetically generated peptide
  VARIANT (1)..(17): Xaa = Any Amino Acid
CCXEXWCCXNPXACTGC

SEQ ID NO: 3899 - protein, 17 aa, Artificial Sequence
  Synthetically generated peptide
  VARIANT (1)..(17): Xaa = Any Amino Acid
CCXEXWCCXNPAXCTGC

SEQ ID NO: 3900 - protein, 17 aa, Artificial Sequence
  Synthetically generated peptide
  VARIANT (1)..(17): Xaa = Any Amino Acid
CCXEXWCCXNPACXTGC

SEQ ID NO: 3901 - protein, 17 aa, Artificial Sequence
  Synthetically generated peptide
  VARIANT (1)..(17): Xaa = Any Amino Acid
CCXEXWCCXNPACTXGC

SEQ ID NO: 3902 - protein, 17 aa, Artificial Sequence
  Synthetically generated peptide
  VARIANT (1)..(17): Xaa = Any Amino Acid
CCXEXWCCXNPACTGXC

SEQ ID NO: 3903 - protein, 16 aa, Artificial Sequence
  Synthetically generated peptide
  VARIANT (1)..(16): Xaa = Any Amino Acid
CCXEXWCCNXPACTGC

SEQ ID NO: 3904 - protein, 17 aa, Artificial Sequence
  Synthetically generated peptide
  VARIANT (1)..(17): Xaa = Any Amino Acid
CCXEXWCCNXXPACTGC

SEQ ID NO: 3905 - protein, 17 aa, Artificial Sequence
  Synthetically generated peptide
  VARIANT (1)..(17): Xaa = Any Amino Acid
CCXEXWCCNXPXACTGC

SEQ ID NO: 3906 - protein, 17 aa, Artificial Sequence
  Synthetically generated peptide
  VARIANT (1)..(17): Xaa = Any Amino Acid
CCXEXWCCNXPAXCTGC

SEQ ID NO: 3907 - protein, 17 aa, Artificial Sequence
  Synthetically generated peptide
  VARIANT (1)..(17): Xaa = Any Amino Acid
CCXEXWCCNXPACXTGC

SEQ ID NO: 3908 - protein, 17 aa, Artificial Sequence
  Synthetically generated peptide
  VARIANT (1)..(17): Xaa = Any Amino Acid
CCXEXWCCNXPACTXGC

SEQ ID NO: 3909 - protein, 17 aa, Artificial Sequence
  Synthetically generated peptide
  VARIANT (1)..(17): Xaa = Any Amino Acid
CCXEXWCCNXPACTGXC

SEQ ID NO: 3910 - protein, 16 aa, Artificial Sequence
  Synthetically generated peptide
  VARIANT (1)..(16): Xaa = Any Amino Acid
CCXEXWCCNPXACTGC

SEQ ID NO: 3911 - protein, 17 aa, Artificial Sequence
  Synthetically generated peptide
  VARIANT (1)..(17): Xaa = Any Amino Acid
CCXEXWCCNPXXACTGC

SEQ ID NO: 3912 - protein, 17 aa, Artificial Sequence
  Synthetically generated peptide
  VARIANT (1)..(17): Xaa = Any Amino Acid
CCXEXWCCNPXAXCTGC

SEQ ID NO: 3913 - protein, 17 aa, Artificial Sequence
  Synthetically generated peptide
  VARIANT (1)..(17): Xaa = Any Amino Acid
CCXEXWCCNPXACXTGC

SEQ ID NO: 3914 - protein, 17 aa, Artificial Sequence
  Synthetically generated peptide
  VARIANT (1)..(17): Xaa = Any Amino Acid
CCXEXWCCNPXACTXGC

SEQ ID NO: 3915 - protein, 17 aa, Artificial Sequence
  Synthetically generated peptide
  VARIANT (1)..(17): Xaa = Any Amino Acid
CCXEXWCCNPXACTGXC

SEQ ID NO: 3916 - protein, 16 aa, Artificial Sequence
  Synthetically generated peptide
  VARIANT (1)..(16): Xaa = Any Amino Acid
CCXEXWCCNPAXCTGC

SEQ ID NO: 3917 - protein, 17 aa, Artificial Sequence
  Synthetically generated peptide
  VARIANT (1)..(17): Xaa = Any Amino Acid
CCXEXWCCNPAXXCTGC

SEQ ID NO: 3918 - protein, 17 aa, Artificial Sequence
  Synthetically generated peptide
  VARIANT (1)..(17): Xaa = Any Amino Acid
CCXEXWCCNPAXCXTGC

SEQ ID NO: 3919 - protein, 17 aa, Artificial Sequence
  Synthetically generated peptide
  VARIANT (1)..(17): Xaa = Any Amino Acid
CCXEXWCCNPAXCTXGC

SEQ ID NO: 3920 - protein, 17 aa, Artificial Sequence
  Synthetically generated peptide
  VARIANT (1)..(17): Xaa = Any Amino Acid
CCXEXWCCNPAXCTGXC

SEQ ID NO: 3921 - protein, 16 aa, Artificial Sequence
  Synthetically generated peptide
  VARIANT (1)..(16): Xaa = Any Amino Acid
CCXEXWCCNPACXTGC

SEQ ID NO: 3922 - protein, 17 aa, Artificial Sequence
  Synthetically generated peptide
  VARIANT (1)..(17): Xaa = Any Amino Acid
CCXEXWCCNPACXXTGC

SEQ ID NO: 3923 - protein, 17 aa, Artificial Sequence
  Synthetically generated peptide
  VARIANT (1)..(17): Xaa = Any Amino Acid
CCXEXWCCNPACXTXGC

SEQ ID NO: 3924 - protein, 17 aa, Artificial Sequence
  Synthetically generated peptide
  VARIANT (1)..(17): Xaa = Any Amino Acid
CCXEXWCCNPACXTGXC

SEQ ID NO: 3925 - protein, 16 aa, Artificial Sequence
  Synthetically generated peptide
  VARIANT (1)..(16): Xaa = Any Amino Acid
CCXEXWCCNPACTXGC

SEQ ID NO: 3926 - protein, 17 aa, Artificial Sequence
  Synthetically generated peptide
  VARIANT (1)..(17): Xaa = Any Amino Acid
CCXEXWCCNPACTXXGC

SEQ ID NO: 3927 - protein, 17 aa, Artificial Sequence
  Synthetically generated peptide
  VARIANT (1)..(17): Xaa = Any Amino Acid
CCXEXWCCNPACTXGXC

SEQ ID NO: 3928 - protein, 16 aa, Artificial Sequence
  Synthetically generated peptide
  VARIANT (1)..(16): Xaa = Any Amino Acid
CCXEXWCCNPACTGXC

SEQ ID NO: 3929 - protein, 17 aa, Artificial Sequence
  Synthetically generated peptide
  VARIANT (1)..(17): Xaa = Any Amino Acid
CCXEXWCCNPACTGXXC

SEQ ID NO: 3930 - protein, 15 aa, Artificial Sequence
  Synthetically generated peptide
  VARIANT (1)..(15): Xaa = Any Amino Acid
CCXEWXCCNPACTGC

SEQ ID NO: 3931 - protein, 16 aa, Artificial Sequence
  Synthetically generated peptide
  VARIANT (1)..(16): Xaa = Any Amino Acid
CCXEWXXCCNPACTGC

SEQ ID NO: 3932 - protein, 17 aa, Artificial Sequence
  Synthetically generated peptide
  VARIANT (1)..(17): Xaa = Any Amino Acid
CCXEWXXXCCNPACTGC

SEQ ID NO: 3933 - protein, 17 aa, Artificial Sequence
  Synthetically generated peptide
  VARIANT (1)..(17): Xaa = Any Amino Acid
CCXEWXXCCXNPACTGC

SEQ ID NO: 3934 - protein, 17 aa, Artificial Sequence
  Synthetically generated peptide
  VARIANT (1)..(17): Xaa = Any Amino Acid
CCXEWXXCCNXPACTGC

SEQ ID NO: 3935 - protein, 17 aa, Artificial Sequence
  Synthetically generated peptide
  VARIANT (1)..(17): Xaa = Any Amino Acid
CCXEWXXCCNPXACTGC

SEQ ID NO: 3936 - protein, 17 aa, Artificial Sequence
  Synthetically generated peptide
  VARIANT (1)..(17): Xaa = Any Amino Acid
CCXEWXXCCNPAXCTGC

SEQ ID NO: 3937 - protein, 17 aa, Artificial Sequence
  Synthetically generated peptide
  VARIANT (1)..(17): Xaa = Any Amino Acid
CCXEWXXCCNPACXTGC

SEQ ID NO: 3938 - protein, 17 aa, Artificial Sequence
  Synthetically generated peptide
  VARIANT (1)..(17): Xaa = Any Amino Acid
CCXEWXXCCNPACTXGC

SEQ ID NO: 3939 - protein, 17 aa, Artificial Sequence
  Synthetically generated peptide
  VARIANT (1)..(17): Xaa = Any Amino Acid
CCXEWXXCCNPACTGXC

SEQ ID NO: 3940 - protein, 16 aa, Artificial Sequence
  Synthetically generated peptide
  VARIANT (1)..(16): Xaa = Any Amino Acid
CCXEWXCCXNPACTGC

SEQ ID NO: 3941 - protein, 17 aa, Artificial Sequence
  Synthetically generated peptide
  VARIANT (1)..(17): Xaa = Any Amino Acid
CCXEWXCCXXNPACTGC

SEQ ID NO: 3942 - protein, 17 aa, Artificial Sequence
  Synthetically generated peptide
  VARIANT (1)..(17): Xaa = Any Amino Acid
CCXEWXCCXNXPACTGC

SEQ ID NO: 3943 - protein, 17 aa, Artificial Sequence
  Synthetically generated peptide
  VARIANT (1)..(17): Xaa = Any Amino Acid
CCXEWXCCXNPXACTGC

SEQ ID NO: 3944 - protein, 17 aa, Artificial Sequence
  Synthetically generated peptide
  VARIANT (1)..(17): Xaa = Any Amino Acid
CCXEWXCCXNPAXCTGC

SEQ ID NO: 3945 - protein, 17 aa, Artificial Sequence
  Synthetically generated peptide
  VARIANT (1)..(17): Xaa = Any Amino Acid
CCXEWXCCXNPACXTGC

SEQ ID NO: 3946 - protein, 17 aa, Artificial Sequence
  Synthetically generated peptide
  VARIANT (1)..(17): Xaa = Any Amino Acid
CCXEWXCCXNPACTXGC

SEQ ID NO: 3947 - protein, 17 aa, Artificial Sequence
  Synthetically generated peptide
  VARIANT (1)..(17): Xaa = Any Amino Acid
CCXEWXCCXNPACTGXC

SEQ ID NO: 3948 - protein, 16 aa, Artificial Sequence
  Synthetically generated peptide
  VARIANT (1)..(16): Xaa = Any Amino Acid
CCXEWXCCNXPACTGC

SEQ ID NO: 3949 - protein, 17 aa, Artificial Sequence
  Synthetically generated peptide
  VARIANT (1)..(17): Xaa = Any Amino Acid
CCXEWXCCNXXPACTGC

SEQ ID NO: 3950 - protein, 17 aa, Artificial Sequence
  Synthetically generated peptide
  VARIANT (1)..(17): Xaa = Any Amino Acid
CCXEWXCCNXPXACTGC

SEQ ID NO: 3951 - protein, 17 aa, Artificial Sequence
  Synthetically generated peptide
  VARIANT (1)..(17): Xaa = Any Amino Acid
CCXEWXCCNXPAXCTGC

SEQ ID NO: 3952 - protein, 17 aa, Artificial Sequence
  Synthetically generated peptide
  VARIANT (1)..(17): Xaa = Any Amino Acid
CCXEWXCCNXPACXTGC

SEQ ID NO: 3953 - protein, 17 aa, Artificial Sequence
  Synthetically generated peptide
  VARIANT (1)..(17): Xaa = Any Amino Acid
CCXEWXCCNXPACTXGC

SEQ ID NO: 3954 - protein, 17 aa, Artificial Sequence
  Synthetically generated peptide
  VARIANT (1)..(17): Xaa = Any Amino Acid
CCXEWXCCNXPACTGXC

SEQ ID NO: 3955 - protein, 16 aa, Artificial Sequence
  Synthetically generated peptide
  VARIANT (1)..(16): Xaa = Any Amino Acid
CCXEWXCCNPXACTGC

SEQ ID NO: 3956 - protein, 17 aa, Artificial Sequence
  Synthetically generated peptide
  VARIANT (1)..(17): Xaa = Any Amino Acid
CCXEWXCCNPXXACTGC

SEQ ID NO: 3957 - protein, 17 aa, Artificial Sequence
  Synthetically generated peptide
  VARIANT (1)..(17): Xaa = Any Amino Acid
CCXEWXCCNPXAXCTGC

SEQ ID NO: 3958 - protein, 17 aa, Artificial Sequence
  Synthetically generated peptide
  VARIANT (1)..(17): Xaa = Any Amino Acid
CCXEWXCCNPXACXTGC

SEQ ID NO: 3959 - protein, 17 aa, Artificial Sequence
  Synthetically generated peptide
  VARIANT (1)..(17): Xaa = Any Amino Acid
CCXEWXCCNPXACTXGC

SEQ ID NO: 3960 - protein, 17 aa, Artificial Sequence
  Synthetically generated peptide
  VARIANT (1)..(17): Xaa = Any Amino Acid
CCXEWXCCNPXACTGXC

SEQ ID NO: 3961 - protein, 16 aa, Artificial Sequence
  Synthetically generated peptide
  VARIANT (1)..(16): Xaa = Any Amino Acid
CCXEWXCCNPAXCTGC

SEQ ID NO: 3962 - protein, 17 aa, Artificial Sequence
  Synthetically generated peptide
  VARIANT (1)..(17): Xaa = Any Amino Acid
CCXEWXCCNPAXXCTGC

SEQ ID NO: 3963 - protein, 17 aa, Artificial Sequence
  Synthetically generated peptide
  VARIANT (1)..(17): Xaa = Any Amino Acid
CCXEWXCCNPAXCXTGC

SEQ ID NO: 3964 - protein, 17 aa, Artificial Sequence
  Synthetically generated peptide
  VARIANT (1)..(17): Xaa = Any Amino Acid
CCXEWXCCNPAXCTXGC

SEQ ID NO: 3965 - protein, 17 aa, Artificial Sequence
  Synthetically generated peptide
  VARIANT (1)..(17): Xaa = Any Amino Acid
CCXEWXCCNPAXCTGXC

SEQ ID NO: 3966 - protein, 16 aa, Artificial Sequence
  Synthetically generated peptide
  VARIANT (1)..(16): Xaa = Any Amino Acid
CCXEWXCCNPACXTGC

SEQ ID NO: 3967 - protein, 17 aa, Artificial Sequence
  Synthetically generated peptide
  VARIANT (1)..(17): Xaa = Any Amino Acid
CCXEWXCCNPACXXTGC

SEQ ID NO: 3968 - protein, 17 aa, Artificial Sequence
  Synthetically generated peptide
  VARIANT (1)..(17): Xaa = Any Amino Acid
CCXEWXCCNPACXTXGC

SEQ ID NO: 3969 - protein, 17 aa, Artificial Sequence
  Synthetically generated peptide
  VARIANT (1)..(17): Xaa = Any Amino Acid
CCXEWXCCNPACXTGXC

SEQ ID NO: 3970 - protein, 16 aa, Artificial Sequence
  Synthetically generated peptide
  VARIANT (1)..(16): Xaa = Any Amino Acid
CCXEWXCCNPACTXGC

SEQ ID NO: 3971 - protein, 17 aa, Artificial Sequence
  Synthetically generated peptide
  VARIANT (1)..(17): Xaa = Any Amino Acid
CCXEWXCCNPACTXXGC

SEQ ID NO: 3972 - protein, 17 aa, Artificial Sequence
  Synthetically generated peptide
  VARIANT (1)..(17): Xaa = Any Amino Acid
CCXEWXCCNPACTXGXC

SEQ ID NO: 3973 - protein, 16 aa, Artificial Sequence
  Synthetically generated peptide
  VARIANT (1)..(16): Xaa = Any Amino Acid
CCXEWXCCNPACTGXC

SEQ ID NO: 3974 - protein, 17 aa, Artificial Sequence
  Synthetically generated peptide
  VARIANT (1)..(17): Xaa = Any Amino Acid
CCXEWXCCNPACTGXXC

SEQ ID NO: 3975 - protein, 15 aa, Artificial Sequence
  Synthetically generated peptide
  VARIANT (1)..(15): Xaa = Any Amino Acid
CCXEWCCXNPACTGC

SEQ ID NO: 3976 - protein, 16 aa, Artificial Sequence
  Synthetically generated peptide
  VARIANT (1)..(16): Xaa = Any Amino Acid
CCXEWCCXXNPACTGC

SEQ ID NO: 3977 - protein, 17 aa, Artificial Sequence
  Synthetically generated peptide
  VARIANT (1)..(17): Xaa = Any Amino Acid
CCXEWCCXXXNPACTGC

SEQ ID NO: 3978 - protein, 17 aa, Artificial Sequence
  Synthetically generated peptide
  VARIANT (1)..(17): Xaa = Any Amino Acid
CCXEWCCXXNXPACTGC

SEQ ID NO: 3979 - protein, 17 aa, Artificial Sequence
  Synthetically generated peptide
  VARIANT (1)..(17): Xaa = Any Amino Acid
CCXEWCCXXNPXACTGC

SEQ ID NO: 3980 - protein, 17 aa, Artificial Sequence
  Synthetically generated peptide
  VARIANT (1)..(17): Xaa = Any Amino Acid
CCXEWCCXXNPAXCTGC

SEQ ID NO: 3981 - protein, 17 aa, Artificial Sequence
  Synthetically generated peptide
  VARIANT (1)..(17): Xaa = Any Amino Acid
CCXEWCCXXNPACXTGC

SEQ ID NO: 3982 - protein, 17 aa, Artificial Sequence
  Synthetically generated peptide
  VARIANT (1)..(17): Xaa = Any Amino Acid
CCXEWCCXXNPACTXGC

SEQ ID NO: 3983 - protein, 17 aa, Artificial Sequence
  Synthetically generated peptide
  VARIANT (1)..(17): Xaa = Any Amino Acid
CCXEWCCXXNPACTGXC

SEQ ID NO: 3984 - protein, 16 aa, Artificial Sequence
  Synthetically generated peptide
  VARIANT (1)..(16): Xaa = Any Amino Acid
CCXEWCCXNXPACTGC

SEQ ID NO: 3985 - protein, 17 aa, Artificial Sequence
  Synthetically generated peptide
  VARIANT (1)..(17): Xaa = Any Amino Acid
CCXEWCCXNXXPACTGC

SEQ ID NO: 3986 - protein, 17 aa, Artificial Sequence
  Synthetically generated peptide
  VARIANT (1)..(17): Xaa = Any Amino Acid
CCXEWCCXNXPXACTGC

SEQ ID NO: 3987 - protein, 17 aa, Artificial Sequence
  Synthetically generated peptide
  VARIANT (1)..(17): Xaa = Any Amino Acid
CCXEWCCXNXPAXCTGC

SEQ ID NO: 3988 - protein, 17 aa, Artificial Sequence
  Synthetically generated peptide
  VARIANT (1)..(17): Xaa = Any Amino Acid
CCXEWCCXNXPACXTGC

SEQ ID NO: 3989 - protein, 17 aa, Artificial Sequence
  Synthetically generated peptide
  VARIANT (1)..(17): Xaa = Any Amino Acid
CCXEWCCXNXPACTXGC

SEQ ID NO: 3990 - protein, 17 aa, Artificial Sequence
  Synthetically generated peptide
  VARIANT (1)..(17): Xaa = Any Amino Acid
CCXEWCCXNXPACTGXC

SEQ ID NO: 3991 - protein, 16 aa, Artificial Sequence
  Synthetically generated peptide
  VARIANT (1)..(16): Xaa = Any Amino Acid
CCXEWCCXNPXACTGC

SEQ ID NO: 3992 - protein, 17 aa, Artificial Sequence
  Synthetically generated peptide
  VARIANT (1)..(17): Xaa = Any Amino Acid
CCXEWCCXNPXXACTGC

SEQ ID NO: 3993 - protein, 17 aa, Artificial Sequence
  Synthetically generated peptide
  VARIANT (1)..(17): Xaa = Any Amino Acid
CCXEWCCXNPXAXCTGC

SEQ ID NO: 3994 - protein, 17 aa, Artificial Sequence
  Synthetically generated peptide
  VARIANT (1)..(17): Xaa = Any Amino Acid
CCXEWCCXNPXACXTGC

SEQ ID NO: 3995 - protein, 17 aa, Artificial Sequence
  Synthetically generated peptide
  VARIANT (1)..(17): Xaa = Any Amino Acid
CCXEWCCXNPXACTXGC

SEQ ID NO: 3996 - protein, 17 aa, Artificial Sequence
  Synthetically generated peptide
  VARIANT (1)..(17): Xaa = Any Amino Acid
CCXEWCCXNPXACTGXC

SEQ ID NO: 3997 - protein, 16 aa, Artificial Sequence
  Synthetically generated peptide
  VARIANT (1)..(16): Xaa = Any Amino Acid
CCXEWCCXNPAXCTGC

SEQ ID NO: 3998 - protein, 17 aa, Artificial Sequence
  Synthetically generated peptide
  VARIANT (1)..(17): Xaa = Any Amino Acid
CCXEWCCXNPAXXCTGC

SEQ ID NO: 3999 - protein, 17 aa, Artificial Sequence
  Synthetically generated peptide
  VARIANT (1)..(17): Xaa = Any Amino Acid
CCXEWCCXNPAXCXTGC

SEQ ID NO: 4000 - protein, 17 aa, Artificial Sequence
  Synthetically generated peptide
  VARIANT (1)..(17): Xaa = Any Amino Acid
CCXEWCCXNPAXCTXGC

SEQ ID NO: 4001 - protein, 17 aa, Artificial Sequence
  Synthetically generated peptide
  VARIANT (1)..(17): Xaa = Any Amino Acid
CCXEWCCXNPAXCTGXC

SEQ ID NO: 4002 - protein, 16 aa, Artificial Sequence
  Synthetically generated peptide
  VARIANT (1)..(16): Xaa = Any Amino Acid
CCXEWCCXNPACXTGC

SEQ ID NO: 4003 - protein, 17 aa, Artificial Sequence
  Synthetically generated peptide
  VARIANT (1)..(17): Xaa = Any Amino Acid
CCXEWCCXNPACXXTGC

SEQ ID NO: 4004 - protein, 17 aa, Artificial Sequence
  Synthetically generated peptide
  VARIANT (1)..(17): Xaa = Any Amino Acid
CCXEWCCXNPACXTXGC

SEQ ID NO: 4005 - protein, 17 aa, Artificial Sequence
  Synthetically generated peptide
  VARIANT (1)..(17): Xaa = Any Amino Acid
CCXEWCCXNPACXTGXC

SEQ ID NO: 4006 - protein, 16 aa, Artificial Sequence
  Synthetically generated peptide
  VARIANT (1)..(16): Xaa = Any Amino Acid
CCXEWCCXNPACTXGC

SEQ ID NO: 4007 - protein, 17 aa, Artificial Sequence
  Synthetically generated peptide
  VARIANT (1)..(17): Xaa = Any Amino Acid
CCXEWCCXNPACTXXGC

SEQ ID NO: 4008 - protein, 17 aa, Artificial Sequence
  Synthetically generated peptide
  VARIANT (1)..(17): Xaa = Any Amino Acid
CCXEWCCXNPACTXGXC

SEQ ID NO: 4009 - protein, 16 aa, Artificial Sequence
  Synthetically generated peptide
  VARIANT (1)..(16): Xaa = Any Amino Acid
CCXEWCCXNPACTGXC

SEQ ID NO: 4010 - protein, 17 aa, Artificial Sequence
  Synthetically generated peptide
  VARIANT (1)..(17): Xaa = Any Amino Acid
CCXEWCCXNPACTGXXC

SEQ ID NO: 4011 - protein, 15 aa, Artificial Sequence
  Synthetically generated peptide
  VARIANT (1)..(15): Xaa = Any Amino Acid
CCXEWCCNXPACTGC

SEQ ID NO: 4012 - protein, 16 aa, Artificial Sequence
  Synthetically generated peptide
  VARIANT (1)..(16): Xaa = Any Amino Acid
CCXEWCCNXXPACTGC

SEQ ID NO: 4013 - protein, 17 aa, Artificial Sequence
  Synthetically generated peptide
  VARIANT (1)..(17): Xaa = Any Amino Acid
CCXEWCCNXXXPACTGC

SEQ ID NO: 4014 - protein, 17 aa, Artificial Sequence
  Synthetically generated peptide
  VARIANT (1)..(17): Xaa = Any Amino Acid
CCXEWCCNXXPXACTGC

SEQ ID NO: 4015 - protein, 17 aa, Artificial Sequence
  Synthetically generated peptide
  VARIANT (1)..(17): Xaa = Any Amino Acid
CCXEWCCNXXPAXCTGC

SEQ ID NO: 4016 - protein, 17 aa, Artificial Sequence
  Synthetically generated peptide
  VARIANT (1)..(17): Xaa = Any Amino Acid
CCXEWCCNXXPACXTGC

SEQ ID NO: 4017 - protein, 17 aa, Artificial Sequence
  Synthetically generated peptide
  VARIANT (1)..(17): Xaa = Any Amino Acid
CCXEWCCNXXPACTXGC

SEQ ID NO: 4018 - protein, 17 aa, Artificial Sequence
  Synthetically generated peptide
  VARIANT (1)..(17): Xaa = Any Amino Acid
CCXEWCCNXXPACTGXC

SEQ ID NO: 4019 - protein, 16 aa, Artificial Sequence
  Synthetically generated peptide
  VARIANT (1)..(16): Xaa = Any Amino Acid
CCXEWCCNXPXACTGC

SEQ ID NO: 4020 - protein, 17 aa, Artificial Sequence
  Synthetically generated peptide
  VARIANT (1)..(17): Xaa = Any Amino Acid
CCXEWCCNXPXXACTGC

SEQ ID NO: 4021 - protein, 17 aa, Artificial Sequence
  Synthetically generated peptide
  VARIANT (1)..(17): Xaa = Any Amino Acid
CCXEWCCNXPXAXCTGC

SEQ ID NO: 4022 - protein, 17 aa, Artificial Sequence
  Synthetically generated peptide
  VARIANT (1)..(17): Xaa = Any Amino Acid
CCXEWCCNXPXACXTGC

SEQ ID NO: 4023 - protein, 17 aa, Artificial Sequence
  Synthetically generated peptide
  VARIANT (1)..(17): Xaa = Any Amino Acid
CCXEWCCNXPXACTXGC

SEQ ID NO: 4024 - protein, 17 aa, Artificial Sequence
  Synthetically generated peptide
  VARIANT (1)..(17): Xaa = Any Amino Acid
CCXEWCCNXPXACTGXC

SEQ ID NO: 4025 - protein, 16 aa, Artificial Sequence
  Synthetically generated peptide
  VARIANT (1)..(16): Xaa = Any Amino Acid
CCXEWCCNXPAXCTGC

SEQ ID NO: 4026 - protein, 17 aa, Artificial Sequence
  Synthetically generated peptide
  VARIANT (1)..(17): Xaa = Any Amino Acid
CCXEWCCNXPAXXCTGC

SEQ ID NO: 4027 - protein, 17 aa, Artificial Sequence
  Synthetically generated peptide
  VARIANT (1)..(17): Xaa = Any Amino Acid
CCXEWCCNXPAXCXTGC

SEQ ID NO: 4028 - protein, 17 aa, Artificial Sequence
  Synthetically generated peptide
  VARIANT (1)..(17): Xaa = Any Amino Acid
CCXEWCCNXPAXCTXGC

SEQ ID NO: 4029 - protein, 17 aa, Artificial Sequence
  Synthetically generated peptide
  VARIANT (1)..(17): Xaa = Any Amino Acid
CCXEWCCNXPAXCTGXC

SEQ ID NO: 4030 - protein, 16 aa, Artificial Sequence
  Synthetically generated peptide
  VARIANT (1)..(16): Xaa = Any Amino Acid
CCXEWCCNXPACXTGC

SEQ ID NO: 4031 - protein, 17 aa, Artificial Sequence
  Synthetically generated peptide
  VARIANT (1)..(17): Xaa = Any Amino Acid
CCXEWCCNXPACXXTGC

SEQ ID NO: 4032 - protein, 17 aa, Artificial Sequence
  Synthetically generated peptide
  VARIANT (1)..(17): Xaa = Any Amino Acid
CCXEWCCNXPACXTXGC

SEQ ID NO: 4033 - protein, 17 aa, Artificial Sequence
  Synthetically generated peptide
  VARIANT (1)..(17): Xaa = Any Amino Acid
CCXEWCCNXPACXTGXC

SEQ ID NO: 4034 - protein, 16 aa, Artificial Sequence
  Synthetically generated peptide
  VARIANT (1)..(16): Xaa = Any Amino Acid
CCXEWCCNXPACTXGC

SEQ ID NO: 4035 - protein, 17 aa, Artificial Sequence
  Synthetically generated peptide
  VARIANT (1)..(17): Xaa = Any Amino Acid
CCXEWCCNXPACTXXGC

SEQ ID NO: 4036 - protein, 17 aa, Artificial Sequence
  Synthetically generated peptide
  VARIANT (1)..(17): Xaa = Any Amino Acid
CCXEWCCNXPACTXGXC

SEQ ID NO: 4037 - protein, 16 aa, Artificial Sequence
  Synthetically generated peptide
  VARIANT (1)..(16): Xaa = Any Amino Acid
CCXEWCCNXPACTGXC

SEQ ID NO: 4038 - protein, 17 aa, Artificial Sequence
  Synthetically generated peptide
  VARIANT (1)..(17): Xaa = Any Amino Acid
CCXEWCCNXPACTGXXC

SEQ ID NO: 4039 - protein, 15 aa, Artificial Sequence
  Synthetically generated peptide
  VARIANT (1)..(15): Xaa = Any Amino Acid
CCXEWCCNPXACTGC

SEQ ID NO: 4040 - protein, 16 aa, Artificial Sequence
  Synthetically generated peptide
  VARIANT (1)..(16): Xaa = Any Amino Acid
CCXEWCCNPXXACTGC

SEQ ID NO: 4041 - protein, 17 aa, Artificial Sequence
  Synthetically generated peptide
  VARIANT (1)..(17): Xaa = Any Amino Acid
CCXEWCCNPXXXACTGC

SEQ ID NO: 4042 - protein, 17 aa, Artificial Sequence
  Synthetically generated peptide
  VARIANT (1)..(17): Xaa = Any Amino Acid
CCXEWCCNPXXAXCTGC

SEQ ID NO: 4043 - protein, 17 aa, Artificial Sequence
  Synthetically generated peptide
  VARIANT (1)..(17): Xaa = Any Amino Acid
CCXEWCCNPXXACXTGC

SEQ ID NO: 4044 - protein, 17 aa, Artificial Sequence
  Synthetically generated peptide
  VARIANT (1)..(17): Xaa = Any Amino Acid
CCXEWCCNPXXACTXGC

SEQ ID NO: 4045 - protein, 17 aa, Artificial Sequence
  Synthetically generated peptide
  VARIANT (1)..(17): Xaa = Any Amino Acid
CCXEWCCNPXXACTGXC

SEQ ID NO: 4046 - protein, 16 aa, Artificial Sequence
  Synthetically generated peptide
  VARIANT (1)..(16): Xaa = Any Amino Acid
CCXEWCCNPXAXCTGC

SEQ ID NO: 4047 - protein, 17 aa, Artificial Sequence
  Synthetically generated peptide
  VARIANT (1)..(17): Xaa = Any Amino Acid
CCXEWCCNPXAXXCTGC

SEQ ID NO: 4048 - protein, 17 aa, Artificial Sequence
  Synthetically generated peptide
  VARIANT (1)..(17): Xaa = Any Amino Acid
CCXEWCCNPXAXCXTGC

SEQ ID NO: 4049 - protein, 17 aa, Artificial Sequence
  Synthetically generated peptide
  VARIANT (1)..(17): Xaa = Any Amino Acid
CCXEWCCNPXAXCTXGC

SEQ ID NO: 4050 - protein, 17 aa, Artificial Sequence
  Synthetically generated peptide
  VARIANT (1)..(17): Xaa = Any Amino Acid
CCXEWCCNPXAXCTGXC

SEQ ID NO: 4051 - protein, 16 aa, Artificial Sequence
  Synthetically generated peptide
  VARIANT (1)..(16): Xaa = Any Amino Acid
CCXEWCCNPXACXTGC

SEQ ID NO: 4052 - protein, 17 aa, Artificial Sequence
  Synthetically generated peptide
  VARIANT (1)..(17): Xaa = Any Amino Acid
CCXEWCCNPXACXXTGC

SEQ ID NO: 4053 - protein, 17 aa, Artificial Sequence
  Synthetically generated peptide
  VARIANT (1)..(17): Xaa = Any Amino Acid
CCXEWCCNPXACXTXGC

SEQ ID NO: 4054 - protein, 17 aa, Artificial Sequence
  Synthetically generated peptide
  VARIANT (1)..(17): Xaa = Any Amino Acid
CCXEWCCNPXACXTGXC

SEQ ID NO: 4055 - protein, 16 aa, Artificial Sequence
  Synthetically generated peptide
  VARIANT (1)..(16): Xaa = Any Amino Acid
CCXEWCCNPXACTXGC

SEQ ID NO: 4056 - protein, 17 aa, Artificial Sequence
  Synthetically generated peptide
  VARIANT (1)..(17): Xaa = Any Amino Acid
CCXEWCCNPXACTXXGC

SEQ ID NO: 4057 - protein, 17 aa, Artificial Sequence
  Synthetically generated peptide
  VARIANT (1)..(17): Xaa = Any Amino Acid
CCXEWCCNPXACTXGXC

SEQ ID NO: 4058 - protein, 16 aa, Artificial Sequence
  Synthetically generated peptide
  VARIANT (1)..(16): Xaa = Any Amino Acid
CCXEWCCNPXACTGXC

SEQ ID NO: 4059 - protein, 17 aa, Artificial Sequence
  Synthetically generated peptide
  VARIANT (1)..(17): Xaa = Any Amino Acid
CCXEWCCNPXACTGXXC

SEQ ID NO: 4060 - protein, 15 aa, Artificial Sequence
  Synthetically generated peptide
  VARIANT (1)..(15): Xaa = Any Amino Acid
CCXEWCCNPAXCTGC

SEQ ID NO: 4061 - protein, 16 aa, Artificial Sequence
  Synthetically generated peptide
  VARIANT (1)..(16): Xaa = Any Amino Acid
CCXEWCCNPAXXCTGC

SEQ ID NO: 4062 - protein, 17 aa, Artificial Sequence
  Synthetically generated peptide
  VARIANT (1)..(17): Xaa = Any Amino Acid
CCXEWCCNPAXXXCTGC

SEQ ID NO: 4063 - protein, 17 aa, Artificial Sequence
  Synthetically generated peptide
  VARIANT (1)..(17): Xaa = Any Amino Acid
CCXEWCCNPAXXCXTGC

SEQ ID NO: 4064 - protein, 17 aa, Artificial Sequence
  Synthetically generated peptide
  VARIANT (1)..(17): Xaa = Any Amino Acid
CCXEWCCNPAXXCTXGC

SEQ ID NO: 4065 - protein, 17 aa, Artificial Sequence
  Synthetically generated peptide
  VARIANT (1)..(17): Xaa = Any Amino Acid
CCXEWCCNPAXXCTGXC

SEQ ID NO: 4066 - protein, 16 aa, Artificial Sequence
  Synthetically generated peptide
  VARIANT (1)..(16): Xaa = Any Amino Acid
CCXEWCCNPAXCXTGC

SEQ ID NO: 4067 - protein, 17 aa, Artificial Sequence
  Synthetically generated peptide
  VARIANT (1)..(17): Xaa = Any Amino Acid
CCXEWCCNPAXCXXTGC

SEQ ID NO: 4068 - protein, 17 aa, Artificial Sequence
  Synthetically generated peptide
  VARIANT (1)..(17): Xaa = Any Amino Acid
CCXEWCCNPAXCXTXGC

SEQ ID NO: 4069 - protein, 17 aa, Artificial Sequence
  Synthetically generated peptide
  VARIANT (1)..(17): Xaa = Any Amino Acid
CCXEWCCNPAXCXTGXC

SEQ ID NO: 4070 - protein, 16 aa, Artificial Sequence
  Synthetically generated peptide
  VARIANT (1)..(16): Xaa = Any Amino Acid
CCXEWCCNPAXCTXGC

SEQ ID NO: 4071 - protein, 17 aa, Artificial Sequence
  Synthetically generated peptide
  VARIANT (1)..(17): Xaa = Any Amino Acid
CCXEWCCNPAXCTXXGC

SEQ ID NO: 4072 - protein, 17 aa, Artificial Sequence
  Synthetically generated peptide
  VARIANT (1)..(17): Xaa = Any Amino Acid
CCXEWCCNPAXCTXGXC

SEQ ID NO: 4073 - protein, 16 aa, Artificial Sequence
  Synthetically generated peptide
  VARIANT (1)..(16): Xaa = Any Amino Acid
CCXEWCCNPAXCTGXC

SEQ ID NO: 4074 - protein, 17 aa, Artificial Sequence
  Synthetically generated peptide
  VARIANT (1)..(17): Xaa = Any Amino Acid
CCXEWCCNPAXCTGXXC

SEQ ID NO: 4075 - protein, 15 aa, Artificial Sequence
  Synthetically generated peptide
  VARIANT (1)..(15): Xaa = Any Amino Acid
CCXEWCCNPACXTGC

SEQ ID NO: 4076 - protein, 16 aa, Artificial Sequence
  Synthetically generated peptide
  VARIANT (1)..(16): Xaa = Any Amino Acid
CCXEWCCNPACXXTGC

SEQ ID NO: 4077 - protein, 17 aa, Artificial Sequence
  Synthetically generated peptide
  VARIANT (1)..(17): Xaa = Any Amino Acid
CCXEWCCNPACXXXTGC

SEQ ID NO: 4078 - protein, 17 aa, Artificial Sequence
  Synthetically generated peptide
  VARIANT (1)..(17): Xaa = Any Amino Acid
CCXEWCCNPACXXTXGC

SEQ ID NO: 4079 - protein, 17 aa, Artificial Sequence
  Synthetically generated peptide
  VARIANT (1)..(17): Xaa = Any Amino Acid
CCXEWCCNPACXXTGXC

SEQ ID NO: 4080 - protein, 16 aa, Artificial Sequence
  Synthetically generated peptide
  VARIANT (1)..(16): Xaa = Any Amino Acid
CCXEWCCNPACXTXGC

SEQ ID NO: 4081 - protein, 17 aa, Artificial Sequence
  Synthetically generated peptide
  VARIANT (1)..(17): Xaa = Any Amino Acid
CCXEWCCNPACXTXXGC

SEQ ID NO: 4082 - protein, 17 aa, Artificial Sequence
  Synthetically generated peptide
  VARIANT (1)..(17): Xaa = Any Amino Acid
CCXEWCCNPACXTXGXC

SEQ ID NO: 4083 - protein, 16 aa, Artificial Sequence
  Synthetically generated peptide
  VARIANT (1)..(16): Xaa = Any Amino Acid
CCXEWCCNPACXTGXC

SEQ ID NO: 4084 - protein, 17 aa, Artificial Sequence
  Synthetically generated peptide
  VARIANT (1)..(17): Xaa = Any Amino Acid
CCXEWCCNPACXTGXXC

SEQ ID NO: 4085 - protein, 15 aa, Artificial Sequence
  Synthetically generated peptide
  VARIANT (1)..(15): Xaa = Any Amino Acid
CCXEWCCNPACTXGC

SEQ ID NO: 4086 - protein, 16 aa, Artificial Sequence
  Synthetically generated peptide
  VARIANT (1)..(16): Xaa = Any Amino Acid
CCXEWCCNPACTXXGC

SEQ ID NO: 4087 - protein, 17 aa, Artificial Sequence
  Synthetically generated peptide
  VARIANT (1)..(17): Xaa = Any Amino Acid
CCXEWCCNPACTXXXGC

SEQ ID NO: 4088 - protein, 17 aa, Artificial Sequence
  Synthetically generated peptide
  VARIANT (1)..(17): Xaa = Any Amino Acid
CCXEWCCNPACTXXGXC

SEQ ID NO: 4089 - protein, 16 aa, Artificial Sequence
  Synthetically generated peptide
  VARIANT (1)..(16): Xaa = Any Amino Acid
CCXEWCCNPACTXGXC

SEQ ID NO: 4090 - protein, 17 aa, Artificial Sequence
  Synthetically generated peptide
  VARIANT (1)..(17): Xaa = Any Amino Acid
CCXEWCCNPACTXGXXC

SEQ ID NO: 4091 - protein, 15 aa, Artificial Sequence
  Synthetically generated peptide
  VARIANT (1)..(15): Xaa = Any Amino Acid
CCXEWCCNPACTGXC

SEQ ID NO: 4092 - protein, 16 aa, Artificial Sequence
  Synthetically generated peptide
  VARIANT (1)..(16): Xaa = Any Amino Acid
CCXEWCCNPACTGXXC

SEQ ID NO: 4093 - protein, 17 aa, Artificial Sequence
  Synthetically generated peptide
  VARIANT (1)..(17): Xaa = Any Amino Acid
CCXEWCCNPACTGXXXC

SEQ ID NO: 4094 - protein, 14 aa, Artificial Sequence
  Synthetically generated peptide
  VARIANT (1)..(14): Xaa = Any Amino Acid
CCEXWCCNPACTGC

SEQ ID NO: 4095 - protein, 15 aa, Artificial Sequence
  Synthetically generated peptide
  VARIANT (1)..(15): Xaa = Any Amino Acid
CCEXXWCCNPACTGC

SEQ ID NO: 4096 - protein, 16 aa, Artificial Sequence
  Synthetically generated peptide
  VARIANT (1)..(16): Xaa = Any Amino Acid
CCEXXXWCCNPACTGC

SEQ ID NO: 4097 - protein, 17 aa, Artificial Sequence
  Synthetically generated peptide
  VARIANT (1)..(17): Xaa = Any Amino Acid
CCEXXXXWCCNPACTGC

SEQ ID NO: 4098 - protein, 17 aa, Artificial Sequence
  Synthetically generated peptide
  VARIANT (1)..(17): Xaa = Any Amino Acid
CCEXXXWXCCNPACTGC

SEQ ID NO: 4099 - protein, 17 aa, Artificial Sequence
  Synthetically generated peptide
  VARIANT (1)..(17): Xaa = Any Amino Acid
CCEXXXWCCXNPACTGC

SEQ ID NO: 4100 - protein, 17 aa, Artificial Sequence
  Synthetically generated peptide
  VARIANT (1)..(17): Xaa = Any Amino Acid
CCEXXXWCCNXPACTGC

SEQ ID NO: 4101 - protein, 17 aa, Artificial Sequence
  Synthetically generated peptide
  VARIANT (1)..(17): Xaa = Any Amino Acid
CCEXXXWCCNPXACTGC

SEQ ID NO: 4102 - protein, 17 aa, Artificial Sequence
  Synthetically generated peptide
  VARIANT (1)..(17): Xaa = Any Amino Acid
CCEXXXWCCNPAXCTGC

SEQ ID NO: 4103 - protein, 17 aa, Artificial Sequence
  Synthetically generated peptide
  VARIANT (1)..(17): Xaa = Any Amino Acid
CCEXXXWCCNPACXTGC

SEQ ID NO: 4104 - protein, 17 aa, Artificial Sequence
  Synthetically generated peptide
  VARIANT (1)..(17): Xaa = Any Amino Acid
CCEXXXWCCNPACTXGC

SEQ ID NO: 4105 - protein, 17 aa, Artificial Sequence
  Synthetically generated peptide
  VARIANT (1)..(17): Xaa = Any Amino Acid
CCEXXXWCCNPACTGXC

SEQ ID NO: 4106 - protein, 16 aa, Artificial Sequence
  Synthetically generated peptide
  VARIANT (1)..(16): Xaa = Any Amino Acid
CCEXXWXCCNPACTGC

SEQ ID NO: 4107 - protein, 17 aa, Artificial Sequence
  Synthetically generated peptide
  VARIANT (1)..(17): Xaa = Any Amino Acid
CCEXXWXXCCNPACTGC

SEQ ID NO: 4108 - protein, 17 aa, Artificial Sequence
  Synthetically generated peptide
  VARIANT (1)..(17): Xaa = Any Amino Acid
CCEXXWXCCXNPACTGC

SEQ ID NO: 4109 - protein, 17 aa, Artificial Sequence
  Synthetically generated peptide
  VARIANT (1)..(17): Xaa = Any Amino Acid
CCEXXWXCCNXPACTGC

SEQ ID NO: 4110 - protein, 17 aa, Artificial Sequence
  Synthetically generated peptide
  VARIANT (1)..(17): Xaa = Any Amino Acid
CCEXXWXCCNPXACTGC

SEQ ID NO: 4111 - protein, 17 aa, Artificial Sequence
  Synthetically generated peptide
  VARIANT (1)..(17): Xaa = Any Amino Acid
CCEXXWXCCNPAXCTGC

SEQ ID NO: 4112 - protein, 17 aa, Artificial Sequence
  Synthetically generated peptide
  VARIANT (1)..(17): Xaa = Any Amino Acid
CCEXXWXCCNPACXTGC

SEQ ID NO: 4113 - protein, 17 aa, Artificial Sequence
  Synthetically generated peptide
  VARIANT (1)..(17): Xaa = Any Amino Acid
CCEXXWXCCNPACTXGC

SEQ ID NO: 4114 - protein, 17 aa, Artificial Sequence
  Synthetically generated peptide
  VARIANT (1)..(17): Xaa = Any Amino Acid
CCEXXWXCCNPACTGXC

SEQ ID NO: 4115 - protein, 16 aa, Artificial Sequence
  Synthetically generated peptide
  VARIANT (1)..(16): Xaa = Any Amino Acid
CCEXXWCCXNPACTGC

SEQ ID NO: 4116 - protein, 17 aa, Artificial Sequence
  Synthetically generated peptide
  VARIANT (1)..(17): Xaa = Any Amino Acid
CCEXXWCCXXNPACTGC

SEQ ID NO: 4117 - protein, 17 aa, Artificial Sequence
  Synthetically generated peptide
  VARIANT (1)..(17): Xaa = Any Amino Acid
CCEXXWCCXNXPACTGC

SEQ ID NO: 4118 - protein, 17 aa, Artificial Sequence
  Synthetically generated peptide
  VARIANT (1)..(17): Xaa = Any Amino Acid
CCEXXWCCXNPXACTGC

SEQ ID NO: 4119 - protein, 17 aa, Artificial Sequence
  Synthetically generated peptide
  VARIANT (1)..(17): Xaa = Any Amino Acid
CCEXXWCCXNPAXCTGC

SEQ ID NO: 4120 - protein, 17 aa, Artificial Sequence
  Synthetically generated peptide
  VARIANT (1)..(17): Xaa = Any Amino Acid
CCEXXWCCXNPACXTGC

SEQ ID NO: 4121 - protein, 17 aa, Artificial Sequence
  Synthetically generated peptide
  VARIANT (1)..(17): Xaa = Any Amino Acid
CCEXXWCCXNPACTXGC

SEQ ID NO: 4122 - protein, 17 aa, Artificial Sequence
  Synthetically generated peptide
  VARIANT (1)..(17): Xaa = Any Amino Acid
CCEXXWCCXNPACTGXC

SEQ ID NO: 4123 - protein, 16 aa, Artificial Sequence
  Synthetically generated peptide
  VARIANT (1)..(16): Xaa = Any Amino Acid
CCEXXWCCNXPACTGC

SEQ ID NO: 4124 - protein, 17 aa, Artificial Sequence
  Synthetically generated peptide
  VARIANT (1)..(17): Xaa = Any Amino Acid
CCEXXWCCNXXPACTGC

SEQ ID NO: 4125 - protein, 17 aa, Artificial Sequence
  Synthetically generated peptide
  VARIANT (1)..(17): Xaa = Any Amino Acid
CCEXXWCCNXPXACTGC

SEQ ID NO: 4126 - protein, 17 aa, Artificial Sequence
  Synthetically generated peptide
  VARIANT (1)..(17): Xaa = Any Amino Acid
CCEXXWCCNXPAXCTGC

SEQ ID NO: 4127 - protein, 17 aa, Artificial Sequence
  Synthetically generated peptide
  VARIANT (1)..(17): Xaa = Any Amino Acid
CCEXXWCCNXPACXTGC

SEQ ID NO: 4128 - protein, 17 aa, Artificial Sequence
  Synthetically generated peptide
  VARIANT (1)..(17): Xaa = Any Amino Acid
CCEXXWCCNXPACTXGC

SEQ ID NO: 4129 - protein, 17 aa, Artificial Sequence
  Synthetically generated peptide
  VARIANT (1)..(17): Xaa = Any Amino Acid
CCEXXWCCNXPACTGXC

SEQ ID NO: 4130 - protein, 16 aa, Artificial Sequence
  Synthetically generated peptide
  VARIANT (1)..(16): Xaa = Any Amino Acid
CCEXXWCCNPXACTGC

SEQ ID NO: 4131 - protein, 17 aa, Artificial Sequence
  Synthetically generated peptide
  VARIANT (1)..(17): Xaa = Any Amino Acid
CCEXXWCCNPXXACTGC

SEQ ID NO: 4132 - protein, 17 aa, Artificial Sequence
  Synthetically generated peptide
  VARIANT (1)..(17): Xaa = Any Amino Acid
CCEXXWCCNPXAXCTGC

SEQ ID NO: 4133 - protein, 17 aa, Artificial Sequence
  Synthetically generated peptide
  VARIANT (1)..(17): Xaa = Any Amino Acid
CCEXXWCCNPXACXTGC

SEQ ID NO: 4134 - protein, 17 aa, Artificial Sequence
  Synthetically generated peptide
  VARIANT (1)..(17): Xaa = Any Amino Acid
CCEXXWCCNPXACTXGC

SEQ ID NO: 4135 - protein, 17 aa, Artificial Sequence
  Synthetically generated peptide
  VARIANT (1)..(17): Xaa = Any Amino Acid
CCEXXWCCNPXACTGXC

SEQ ID NO: 4136 - protein, 16 aa, Artificial Sequence
  Synthetically generated peptide
  VARIANT (1)..(16): Xaa = Any Amino Acid
CCEXXWCCNPAXCTGC

SEQ ID NO: 4137 - protein, 17 aa, Artificial Sequence
  Synthetically generated peptide
  VARIANT (1)..(17): Xaa = Any Amino Acid
CCEXXWCCNPAXXCTGC

SEQ ID NO: 4138 - protein, 17 aa, Artificial Sequence
  Synthetically generated peptide
  VARIANT (1)..(17): Xaa = Any Amino Acid
CCEXXWCCNPAXCXTGC

SEQ ID NO: 4139 - protein, 17 aa, Artificial Sequence
  Synthetically generated peptide
  VARIANT (1)..(17): Xaa = Any Amino Acid
CCEXXWCCNPAXCTXGC

SEQ ID NO: 4140 - protein, 17 aa, Artificial Sequence
  Synthetically generated peptide
  VARIANT (1)..(17): Xaa = Any Amino Acid
CCEXXWCCNPAXCTGXC

SEQ ID NO: 4141 - protein, 16 aa, Artificial Sequence
  Synthetically generated peptide
  VARIANT (1)..(16): Xaa = Any Amino Acid
CCEXXWCCNPACXTGC

SEQ ID NO: 4142 - protein, 17 aa, Artificial Sequence
  Synthetically generated peptide
  VARIANT (1)..(17): Xaa = Any Amino Acid
CCEXXWCCNPACXXTGC

SEQ ID NO: 4143 - protein, 17 aa, Artificial Sequence
  Synthetically generated peptide
  VARIANT (1)..(17): Xaa = Any Amino Acid
CCEXXWCCNPACXTXGC

SEQ ID NO: 4144 - protein, 17 aa, Artificial Sequence
  Synthetically generated peptide
  VARIANT (1)..(17): Xaa = Any Amino Acid
CCEXXWCCNPACXTGXC

SEQ ID NO: 4145 - protein, 16 aa, Artificial Sequence
  Synthetically generated peptide
  VARIANT (1)..(16): Xaa = Any Amino Acid
CCEXXWCCNPACTXGC

SEQ ID NO: 4146 - protein, 17 aa, Artificial Sequence
  Synthetically generated peptide
  VARIANT (1)..(17): Xaa = Any Amino Acid
CCEXXWCCNPACTXXGC

SEQ ID NO: 4147 - protein, 17 aa, Artificial Sequence
  Synthetically generated peptide
  VARIANT (1)..(17): Xaa = Any Amino Acid
CCEXXWCCNPACTXGXC

SEQ ID NO: 4148 - protein, 16 aa, Artificial Sequence
  Synthetically generated peptide
  VARIANT (1)..(16): Xaa = Any Amino Acid
CCEXXWCCNPACTGXC

SEQ ID NO: 4149 - protein, 17 aa, Artificial Sequence
  Synthetically generated peptide
  VARIANT (1)..(17): Xaa = Any Amino Acid
CCEXXWCCNPACTGXXC

SEQ ID NO: 4150 - protein, 15 aa, Artificial Sequence
  Synthetically generated peptide
  VARIANT (1)..(15): Xaa = Any Amino Acid
CCEXWXCCNPACTGC

SEQ ID NO: 4151 - protein, 16 aa, Artificial Sequence
  Synthetically generated peptide
  VARIANT (1)..(16): Xaa = Any Amino Acid
CCEXWXXCCNPACTGC

SEQ ID NO: 4152 - protein, 17 aa, Artificial Sequence
  Synthetically generated peptide
  VARIANT (1)..(17): Xaa = Any Amino Acid
CCEXWXXXCCNPACTGC

SEQ ID NO: 4153 - protein, 17 aa, Artificial Sequence
  Synthetically generated peptide
  VARIANT (1)..(17): Xaa = Any Amino Acid
CCEXWXXCCXNPACTGC

SEQ ID NO: 4154 - protein, 17 aa, Artificial Sequence
  Synthetically generated peptide
  VARIANT (1)..(17): Xaa = Any Amino Acid
CCEXWXXCCNXPACTGC

SEQ ID NO: 4155 - protein, 17 aa, Artificial Sequence
  Synthetically generated peptide
  VARIANT (1)..(17): Xaa = Any Amino Acid
CCEXWXXCCNPXACTGC

SEQ ID NO: 4156 - protein, 17 aa, Artificial Sequence
  Synthetically generated peptide
  VARIANT (1)..(17): Xaa = Any Amino Acid
CCEXWXXCCNPAXCTGC

SEQ ID NO: 4157 - protein, 17 aa, Artificial Sequence
  Synthetically generated peptide
  VARIANT (1)..(17): Xaa = Any Amino Acid
CCEXWXXCCNPACXTGC

SEQ ID NO: 4158 - protein, 17 aa, Artificial Sequence
  Synthetically generated peptide
  VARIANT (1)..(17): Xaa = Any Amino Acid
CCEXWXXCCNPACTXGC

SEQ ID NO: 4159 - protein, 17 aa, Artificial Sequence
  Synthetically generated peptide
  VARIANT (1)..(17): Xaa = Any Amino Acid
CCEXWXXCCNPACTGXC

SEQ ID NO: 4160 - protein, 16 aa, Artificial Sequence
  Synthetically generated peptide
  VARIANT (1)..(16): Xaa = Any Amino Acid
CCEXWXCCXNPACTGC

SEQ ID NO: 4161 - protein, 17 aa, Artificial Sequence
  Synthetically generated peptide
  VARIANT (1)..(17): Xaa = Any Amino Acid
CCEXWXCCXXNPACTGC

SEQ ID NO: 4162 - protein, 17 aa, Artificial Sequence
  Synthetically generated peptide
  VARIANT (1)..(17): Xaa = Any Amino Acid
CCEXWXCCXNXPACTGC

SEQ ID NO: 4163 - protein, 17 aa, Artificial Sequence
  Synthetically generated peptide
  VARIANT (1)..(17): Xaa = Any Amino Acid
CCEXWXCCXNPXACTGC

SEQ ID NO: 4164 - protein, 17 aa, Artificial Sequence
  Synthetically generated peptide
  VARIANT (1)..(17): Xaa = Any Amino Acid
CCEXWXCCXNPAXCTGC

SEQ ID NO: 4165 - protein, 17 aa, Artificial Sequence
  Synthetically generated peptide
  VARIANT (1)..(17): Xaa = Any Amino Acid
CCEXWXCCXNPACXTGC

SEQ ID NO: 4166 - protein, 17 aa, Artificial Sequence
  Synthetically generated peptide
  VARIANT (1)..(17): Xaa = Any Amino Acid
CCEXWXCCXNPACTXGC

SEQ ID NO: 4167 - protein, 17 aa, Artificial Sequence
  Synthetically generated peptide
  VARIANT (1)..(17): Xaa = Any Amino Acid
CCEXWXCCXNPACTGXC

SEQ ID NO: 4168 - protein, 16 aa, Artificial Sequence
  Synthetically generated peptide
  VARIANT (1)..(16): Xaa = Any Amino Acid
CCEXWXCCNXPACTGC

SEQ ID NO: 4169 - protein, 17 aa, Artificial Sequence
  Synthetically generated peptide
  VARIANT (1)..(17): Xaa = Any Amino Acid
CCEXWXCCNXXPACTGC

SEQ ID NO: 4170 - protein, 17 aa, Artificial Sequence
  Synthetically generated peptide
  VARIANT (1)..(17): Xaa = Any Amino Acid
CCEXWXCCNXPXACTGC

SEQ ID NO: 4171 - protein, 17 aa, Artificial Sequence
  Synthetically generated peptide
  VARIANT (1)..(17): Xaa = Any Amino Acid
CCEXWXCCNXPAXCTGC

SEQ ID NO: 4172 - protein, 17 aa, Artificial Sequence
  Synthetically generated peptide
  VARIANT (1)..(17): Xaa = Any Amino Acid
CCEXWXCCNXPACXTGC

SEQ ID NO: 4173 - protein, 17 aa, Artificial Sequence
  Synthetically generated peptide
  VARIANT (1)..(17): Xaa = Any Amino Acid
CCEXWXCCNXPACTXGC

SEQ ID NO: 4174 - protein, 17 aa, Artificial Sequence
  Synthetically generated peptide
  VARIANT (1)..(17): Xaa = Any Amino Acid
CCEXWXCCNXPACTGXC

SEQ ID NO: 4175 - protein, 16 aa, Artificial Sequence
  Synthetically generated peptide
  VARIANT (1)..(16): Xaa = Any Amino Acid
CCEXWXCCNPXACTGC

SEQ ID NO: 4176 - protein, 17 aa, Artificial Sequence
  Synthetically generated peptide
  VARIANT (1)..(17): Xaa = Any Amino Acid
CCEXWXCCNPXXACTGC

SEQ ID NO: 4177 - protein, 17 aa, Artificial Sequence
  Synthetically generated peptide
  VARIANT (1)..(17): Xaa = Any Amino Acid
CCEXWXCCNPXAXCTGC

SEQ ID NO: 4178 - protein, 17 aa, Artificial Sequence
  Synthetically generated peptide
  VARIANT (1)..(17): Xaa = Any Amino Acid
CCEXWXCCNPXACXTGC

SEQ ID NO: 4179 - protein, 17 aa, Artificial Sequence
  Synthetically generated peptide
  VARIANT (1)..(17): Xaa = Any Amino Acid
CCEXWXCCNPXACTXGC

SEQ ID NO: 4180 - protein, 17 aa, Artificial Sequence
  Synthetically generated peptide
  VARIANT (1)..(17): Xaa = Any Amino Acid
CCEXWXCCNPXACTGXC

SEQ ID NO: 4181 - protein, 16 aa, Artificial Sequence
  Synthetically generated peptide
  VARIANT (1)..(16): Xaa = Any Amino Acid
CCEXWXCCNPAXCTGC

SEQ ID NO: 4182 - protein, 17 aa, Artificial Sequence
  Synthetically generated peptide
  VARIANT (1)..(17): Xaa = Any Amino Acid
CCEXWXCCNPAXXCTGC

SEQ ID NO: 4183 - protein, 17 aa, Artificial Sequence
  Synthetically generated peptide
  VARIANT (1)..(17): Xaa = Any Amino Acid
CCEXWXCCNPAXCXTGC

SEQ ID NO: 4184 - protein, 17 aa, Artificial Sequence
  Synthetically generated peptide
  VARIANT (1)..(17): Xaa = Any Amino Acid
CCEXWXCCNPAXCTXGC

SEQ ID NO: 4185 - protein, 17 aa, Artificial Sequence
  Synthetically generated peptide
  VARIANT (1)..(17): Xaa = Any Amino Acid
CCEXWXCCNPAXCTGXC

SEQ ID NO: 4186 - protein, 16 aa, Artificial Sequence
  Synthetically generated peptide
  VARIANT (1)..(16): Xaa = Any Amino Acid
CCEXWXCCNPACXTGC

SEQ ID NO: 4187 - protein, 17 aa, Artificial Sequence
  Synthetically generated peptide
  VARIANT (1)..(17): Xaa = Any Amino Acid
CCEXWXCCNPACXXTGC

SEQ ID NO: 4188 - protein, 17 aa, Artificial Sequence
  Synthetically generated peptide
  VARIANT (1)..(17): Xaa = Any Amino Acid
CCEXWXCCNPACXTXGC

SEQ ID NO: 4189 - protein, 17 aa, Artificial Sequence
  Synthetically generated peptide
  VARIANT (1)..(17): Xaa = Any Amino Acid
CCEXWXCCNPACXTGXC

SEQ ID NO: 4190 - protein, 16 aa, Artificial Sequence
  Synthetically generated peptide
  VARIANT (1)..(16): Xaa = Any Amino Acid
CCEXWXCCNPACTXGC

SEQ ID NO: 4191 - protein, 17 aa, Artificial Sequence
  Synthetically generated peptide
  VARIANT (1)..(17): Xaa = Any Amino Acid
CCEXWXCCNPACTXXGC

SEQ ID NO: 4192 - protein, 17 aa, Artificial Sequence
  Synthetically generated peptide
  VARIANT (1)..(17): Xaa = Any Amino Acid
CCEXWXCCNPACTXGXC

SEQ ID NO: 4193 - protein, 16 aa, Artificial Sequence
  Synthetically generated peptide
  VARIANT (1)..(16): Xaa = Any Amino Acid
CCEXWXCCNPACTGXC

SEQ ID NO: 4194 - protein, 17 aa, Artificial Sequence
  Synthetically generated peptide
  VARIANT (1)..(17): Xaa = Any Amino Acid
CCEXWXCCNPACTGXXC

SEQ ID NO: 4195 - protein, 15 aa, Artificial Sequence
  Synthetically generated peptide
  VARIANT (1)..(15): Xaa = Any Amino Acid
CCEXWCCXNPACTGC

SEQ ID NO: 4196 - protein, 16 aa, Artificial Sequence
  Synthetically generated peptide
  VARIANT (1)..(16): Xaa = Any Amino Acid
CCEXWCCXXNPACTGC

SEQ ID NO: 4197 - protein, 17 aa, Artificial Sequence
  Synthetically generated peptide
  VARIANT (1)..(17): Xaa = Any Amino Acid
CCEXWCCXXXNPACTGC

SEQ ID NO: 4198 - protein, 17 aa, Artificial Sequence
  Synthetically generated peptide
  VARIANT (1)..(17): Xaa = Any Amino Acid
CCEXWCCXXNXPACTGC

SEQ ID NO: 4199 - protein, 17 aa, Artificial Sequence
  Synthetically generated peptide
  VARIANT (1)..(17): Xaa = Any Amino Acid
CCEXWCCXXNPXACTGC

SEQ ID NO: 4200 - protein, 17 aa, Artificial Sequence
  Synthetically generated peptide
  VARIANT (1)..(17): Xaa = Any Amino Acid
CCEXWCCXXNPAXCTGC

SEQ ID NO: 4201 - protein, 17 aa, Artificial Sequence
  Synthetically generated peptide
  VARIANT (1)..(17): Xaa = Any Amino Acid
CCEXWCCXXNPACXTGC

SEQ ID NO: 4202 - protein, 17 aa, Artificial Sequence
  Synthetically generated peptide
  VARIANT (1)..(17): Xaa = Any Amino Acid
CCEXWCCXXNPACTXGC

SEQ ID NO: 4203 - protein, 17 aa, Artificial Sequence
  Synthetically generated peptide
  VARIANT (1)..(17): Xaa = Any Amino Acid
CCEXWCCXXNPACTGXC

SEQ ID NO: 4204 - protein, 16 aa, Artificial Sequence
  Synthetically generated peptide
  VARIANT (1)..(16): Xaa = Any Amino Acid
CCEXWCCXNXPACTGC

SEQ ID NO: 4205 - protein, 17 aa, Artificial Sequence
  Synthetically generated peptide
  VARIANT (1)..(17): Xaa = Any Amino Acid
CCEXWCCXNXXPACTGC

SEQ ID NO: 4206 - protein, 17 aa, Artificial Sequence
  Synthetically generated peptide
  VARIANT (1)..(17): Xaa = Any Amino Acid
CCEXWCCXNXPXACTGC

SEQ ID NO: 4207 - protein, 17 aa, Artificial Sequence
  Synthetically generated peptide
  VARIANT (1)..(17): Xaa = Any Amino Acid
CCEXWCCXNXPAXCTGC

SEQ ID NO: 4208 - protein, 17 aa, Artificial Sequence
  Synthetically generated peptide
  VARIANT (1)..(17): Xaa = Any Amino Acid
CCEXWCCXNXPACXTGC

SEQ ID NO: 4209 - protein, 17 aa, Artificial Sequence
  Synthetically generated peptide
  VARIANT (1)..(17): Xaa = Any Amino Acid
CCEXWCCXNXPACTXGC

SEQ ID NO: 4210 - protein, 17 aa, Artificial Sequence
  Synthetically generated peptide
  VARIANT (1)..(17): Xaa = Any Amino Acid
CCEXWCCXNXPACTGXC

SEQ ID NO: 4211 - protein, 16 aa, Artificial Sequence
  Synthetically generated peptide
  VARIANT (1)..(16): Xaa = Any Amino Acid
CCEXWCCXNPXACTGC

SEQ ID NO: 4212 - protein, 17 aa, Artificial Sequence
  Synthetically generated peptide
  VARIANT (1)..(17): Xaa = Any Amino Acid
CCEXWCCXNPXXACTGC

SEQ ID NO: 4213 - protein, 17 aa, Artificial Sequence
  Synthetically generated peptide
  VARIANT (1)..(17): Xaa = Any Amino Acid
CCEXWCCXNPXAXCTGC

SEQ ID NO: 4214 - protein, 17 aa, Artificial Sequence
  Synthetically generated peptide
  VARIANT (1)..(17): Xaa = Any Amino Acid
CCEXWCCXNPXACXTGC

SEQ ID NO: 4215 - protein, 17 aa, Artificial Sequence
  Synthetically generated peptide
  VARIANT (1)..(17): Xaa = Any Amino Acid
CCEXWCCXNPXACTXGC

SEQ ID NO: 4216 - protein, 17 aa, Artificial Sequence
  Synthetically generated peptide
  VARIANT (1)..(17): Xaa = Any Amino Acid
CCEXWCCXNPXACTGXC

SEQ ID NO: 4217 - protein, 16 aa, Artificial Sequence
  Synthetically generated peptide
  VARIANT (1)..(16): Xaa = Any Amino Acid
CCEXWCCXNPAXCTGC

SEQ ID NO: 4218 - protein, 17 aa, Artificial Sequence
  Synthetically generated peptide
  VARIANT (1)..(17): Xaa = Any Amino Acid
CCEXWCCXNPAXXCTGC

SEQ ID NO: 4219 - protein, 17 aa, Artificial Sequence
  Synthetically generated peptide
  VARIANT (1)..(17): Xaa = Any Amino Acid
CCEXWCCXNPAXCXTGC

SEQ ID NO: 4220 - protein, 17 aa, Artificial Sequence
  Synthetically generated peptide
  VARIANT (1)..(17): Xaa = Any Amino Acid
CCEXWCCXNPAXCTXGC

SEQ ID NO: 4221 - protein, 17 aa, Artificial Sequence
  Synthetically generated peptide
  VARIANT (1)..(17): Xaa = Any Amino Acid
CCEXWCCXNPAXCTGXC

SEQ ID NO: 4222 - protein, 16 aa, Artificial Sequence
  Synthetically generated peptide
  VARIANT (1)..(16): Xaa = Any Amino Acid
CCEXWCCXNPACXTGC

SEQ ID NO: 4223 - protein, 17 aa, Artificial Sequence
  Synthetically generated peptide
  VARIANT (1)..(17): Xaa = Any Amino Acid
CCEXWCCXNPACXXTGC

SEQ ID NO: 4224 - protein, 17 aa, Artificial Sequence
  Synthetically generated peptide
  VARIANT (1)..(17): Xaa = Any Amino Acid
CCEXWCCXNPACXTXGC

SEQ ID NO: 4225 - protein, 17 aa, Artificial Sequence
  Synthetically generated peptide
  VARIANT (1)..(17): Xaa = Any Amino Acid
CCEXWCCXNPACXTGXC

SEQ ID NO: 4226 - protein, 16 aa, Artificial Sequence
  Synthetically generated peptide
  VARIANT (1)..(16): Xaa = Any Amino Acid
CCEXWCCXNPACTXGC

SEQ ID NO: 4227 - protein, 17 aa, Artificial Sequence
  Synthetically generated peptide
  VARIANT (1)..(17): Xaa = Any Amino Acid
CCEXWCCXNPACTXXGC

SEQ ID NO: 4228 - protein, 17 aa, Artificial Sequence
  Synthetically generated peptide
  VARIANT (1)..(17): Xaa = Any Amino Acid
CCEXWCCXNPACTXGXC

SEQ ID NO: 4229 - protein, 16 aa, Artificial Sequence
  Synthetically generated peptide
  VARIANT (1)..(16): Xaa = Any Amino Acid
CCEXWCCXNPACTGXC

SEQ ID NO: 4230 - protein, 17 aa, Artificial Sequence
  Synthetically generated peptide
  VARIANT (1)..(17): Xaa = Any Amino Acid
CCEXWCCXNPACTGXXC

SEQ ID NO: 4231 - protein, 15 aa, Artificial Sequence
  Synthetically generated peptide
  VARIANT (1)..(15): Xaa = Any Amino Acid
CCEXWCCNXPACTGC

SEQ ID NO: 4232 - protein, 16 aa, Artificial Sequence
  Synthetically generated peptide
  VARIANT (1)..(16): Xaa = Any Amino Acid
CCEXWCCNXXPACTGC

SEQ ID NO: 4233 - protein, 17 aa, Artificial Sequence
  Synthetically generated peptide
  VARIANT (1)..(17): Xaa = Any Amino Acid
CCEXWCCNXXXPACTGC

SEQ ID NO: 4234 - protein, 17 aa, Artificial Sequence
  Synthetically generated peptide
  VARIANT (1)..(17): Xaa = Any Amino Acid
CCEXWCCNXXPXACTGC

SEQ ID NO: 4235 - protein, 17 aa, Artificial Sequence
  Synthetically generated peptide
  VARIANT (1)..(17): Xaa = Any Amino Acid
CCEXWCCNXXPAXCTGC

SEQ ID NO: 4236 - protein, 17 aa, Artificial Sequence
  Synthetically generated peptide
  VARIANT (1)..(17): Xaa = Any Amino Acid
CCEXWCCNXXPACXTGC

SEQ ID NO: 4237 - protein, 17 aa, Artificial Sequence
  Synthetically generated peptide
  VARIANT (1)..(17): Xaa = Any Amino Acid
CCEXWCCNXXPACTXGC

SEQ ID NO: 4238 - protein, 17 aa, Artificial Sequence
  Synthetically generated peptide
  VARIANT (1)..(17): Xaa = Any Amino Acid
CCEXWCCNXXPACTGXC

SEQ ID NO: 4239 - protein, 16 aa, Artificial Sequence
  Synthetically generated peptide
  VARIANT (1)..(16): Xaa = Any Amino Acid
CCEXWCCNXPXACTGC

SEQ ID NO: 4240 - protein, 17 aa, Artificial Sequence
  Synthetically generated peptide
  VARIANT (1)..(17): Xaa = Any Amino Acid
CCEXWCCNXPXXACTGC

SEQ ID NO: 4241 - protein, 17 aa, Artificial Sequence
  Synthetically generated peptide
  VARIANT (1)..(17): Xaa = Any Amino Acid
CCEXWCCNXPXAXCTGC

SEQ ID NO: 4242 - protein, 17 aa, Artificial Sequence
  Synthetically generated peptide
  VARIANT (1)..(17): Xaa = Any Amino Acid
CCEXWCCNXPXACXTGC

SEQ ID NO: 4243 - protein, 17 aa, Artificial Sequence
  Synthetically generated peptide
  VARIANT (1)..(17): Xaa = Any Amino Acid
CCEXWCCNXPXACTXGC

SEQ ID NO: 4244 - protein, 17 aa, Artificial Sequence
  Synthetically generated peptide
  VARIANT (1)..(17): Xaa = Any Amino Acid
CCEXWCCNXPXACTGXC

SEQ ID NO: 4245 - protein, 16 aa, Artificial Sequence
  Synthetically generated peptide
  VARIANT (1)..(16): Xaa = Any Amino Acid
CCEXWCCNXPAXCTGC

SEQ ID NO: 4246 - protein, 17 aa, Artificial Sequence
  Synthetically generated peptide
  VARIANT (1)..(17): Xaa = Any Amino Acid
CCEXWCCNXPAXXCTGC

SEQ ID NO: 4247 - protein, 17 aa, Artificial Sequence
  Synthetically generated peptide
  VARIANT (1)..(17): Xaa = Any Amino Acid
CCEXWCCNXPAXCXTGC

SEQ ID NO: 4248 - protein, 17 aa, Artificial Sequence
  Synthetically generated peptide
  VARIANT (1)..(17): Xaa = Any Amino Acid
CCEXWCCNXPAXCTXGC

SEQ ID NO: 4249 - protein, 17 aa, Artificial Sequence
  Synthetically generated peptide
  VARIANT (1)..(17): Xaa = Any Amino Acid
CCEXWCCNXPAXCTGXC

SEQ ID NO: 4250 - protein, 16 aa, Artificial Sequence
  Synthetically generated peptide
  VARIANT (1)..(16): Xaa = Any Amino Acid
CCEXWCCNXPACXTGC

SEQ ID NO: 4251 - protein, 17 aa, Artificial Sequence
  Synthetically generated peptide
  VARIANT (1)..(17): Xaa = Any Amino Acid
CCEXWCCNXPACXXTGC

SEQ ID NO: 4252 - protein, 17 aa, Artificial Sequence
  Synthetically generated peptide
  VARIANT (1)..(17): Xaa = Any Amino Acid
CCEXWCCNXPACXTXGC

SEQ ID NO: 4253 - protein, 17 aa, Artificial Sequence
  Synthetically generated peptide
  VARIANT (1)..(17): Xaa = Any Amino Acid
CCEXWCCNXPACXTGXC

SEQ ID NO: 4254 - protein, 16 aa, Artificial Sequence
  Synthetically generated peptide
  VARIANT (1)..(16): Xaa = Any Amino Acid
CCEXWCCNXPACTXGC

SEQ ID NO: 4255 - protein, 17 aa, Artificial Sequence
  Synthetically generated peptide
  VARIANT (1)..(17): Xaa = Any Amino Acid
CCEXWCCNXPACTXXGC

SEQ ID NO: 4256 - protein, 17 aa, Artificial Sequence
  Synthetically generated peptide
  VARIANT (1)..(17): Xaa = Any Amino Acid
CCEXWCCNXPACTXGXC

SEQ ID NO: 4257 - protein, 16 aa, Artificial Sequence
  Synthetically generated peptide
  VARIANT (1)..(16): Xaa = Any Amino Acid
CCEXWCCNXPACTGXC

SEQ ID NO: 4258 - protein, 17 aa, Artificial Sequence
  Synthetically generated peptide
  VARIANT (1)..(17): Xaa = Any Amino Acid
CCEXWCCNXPACTGXXC

SEQ ID NO: 4259 - protein, 15 aa, Artificial Sequence
  Synthetically generated peptide
  VARIANT (1)..(15): Xaa = Any Amino Acid
CCEXWCCNPXACTGC

SEQ ID NO: 4260 - protein, 16 aa, Artificial Sequence
  Synthetically generated peptide
  VARIANT (1)..(16): Xaa = Any Amino Acid
CCEXWCCNPXXACTGC

SEQ ID NO: 4261 - protein, 17 aa, Artificial Sequence
  Synthetically generated peptide
  VARIANT (1)..(17): Xaa = Any Amino Acid
CCEXWCCNPXXXACTGC

SEQ ID NO: 4262 - protein, 17 aa, Artificial Sequence
  Synthetically generated peptide
  VARIANT (1)..(17): Xaa = Any Amino Acid
CCEXWCCNPXXAXCTGC

SEQ ID NO: 4263 - protein, 17 aa, Artificial Sequence
  Synthetically generated peptide
  VARIANT (1)..(17): Xaa = Any Amino Acid
CCEXWCCNPXXACXTGC

SEQ ID NO: 4264 - protein, 17 aa, Artificial Sequence
  Synthetically generated peptide
  VARIANT (1)..(17): Xaa = Any Amino Acid
CCEXWCCNPXXACTXGC

SEQ ID NO: 4265 - protein, 17 aa, Artificial Sequence
  Synthetically generated peptide
  VARIANT (1)..(17): Xaa = Any Amino Acid
CCEXWCCNPXXACTGXC

SEQ ID NO: 4266 - protein, 16 aa, Artificial Sequence
  Synthetically generated peptide
  VARIANT (1)..(16): Xaa = Any Amino Acid
CCEXWCCNPXAXCTGC

SEQ ID NO: 4267 - protein, 17 aa, Artificial Sequence
  Synthetically generated peptide
  VARIANT (1)..(17): Xaa = Any Amino Acid
CCEXWCCNPXAXXCTGC

SEQ ID NO: 4268 - protein, 17 aa, Artificial Sequence
  Synthetically generated peptide
  VARIANT (1)..(17): Xaa = Any Amino Acid
CCEXWCCNPXAXCXTGC

SEQ ID NO: 4269 - protein, 17 aa, Artificial Sequence
  Synthetically generated peptide
  VARIANT (1)..(17): Xaa = Any Amino Acid
CCEXWCCNPXAXCTXGC

SEQ ID NO: 4270 - protein, 17 aa, Artificial Sequence
  Synthetically generated peptide
  VARIANT (1)..(17): Xaa = Any Amino Acid
CCEXWCCNPXAXCTGXC

SEQ ID NO: 4271 - protein, 16 aa, Artificial Sequence
  Synthetically generated peptide
  VARIANT (1)..(16): Xaa = Any Amino Acid
CCEXWCCNPXACXTGC

SEQ ID NO: 4272 - protein, 17 aa, Artificial Sequence
  Synthetically generated peptide
  VARIANT (1)..(17): Xaa = Any Amino Acid
CCEXWCCNPXACXXTGC

SEQ ID NO: 4273 - protein, 17 aa, Artificial Sequence
  Synthetically generated peptide
  VARIANT (1)..(17): Xaa = Any Amino Acid
CCEXWCCNPXACXTXGC

SEQ ID NO: 4274 - protein, 17 aa, Artificial Sequence
  Synthetically generated peptide
  VARIANT (1)..(17): Xaa = Any Amino Acid
CCEXWCCNPXACXTGXC

SEQ ID NO: 4275 - protein, 16 aa, Artificial Sequence
  Synthetically generated peptide
  VARIANT (1)..(16): Xaa = Any Amino Acid
CCEXWCCNPXACTXGC

SEQ ID NO: 4276 - protein, 17 aa, Artificial Sequence
  Synthetically generated peptide
  VARIANT (1)..(17): Xaa = Any Amino Acid
CCEXWCCNPXACTXXGC

SEQ ID NO: 4277 - protein, 17 aa, Artificial Sequence
  Synthetically generated peptide
  VARIANT (1)..(17): Xaa = Any Amino Acid
CCEXWCCNPXACTXGXC

SEQ ID NO: 4278 - protein, 16 aa, Artificial Sequence
  Synthetically generated peptide
  VARIANT (1)..(16): Xaa = Any Amino Acid
CCEXWCCNPXACTGXC

SEQ ID NO: 4279 - protein, 17 aa, Artificial Sequence
  Synthetically generated peptide
  VARIANT (1)..(17): Xaa = Any Amino Acid
CCEXWCCNPXACTGXXC

SEQ ID NO: 4280 - protein, 15 aa, Artificial Sequence
  Synthetically generated peptide
  VARIANT (1)..(15): Xaa = Any Amino Acid
CCEXWCCNPAXCTGC

SEQ ID NO: 4281 - protein, 16 aa, Artificial Sequence
  Synthetically generated peptide
  VARIANT (1)..(16): Xaa = Any Amino Acid
CCEXWCCNPAXXCTGC

SEQ ID NO: 4282 - protein, 17 aa, Artificial Sequence
  Synthetically generated peptide
  VARIANT (1)..(17): Xaa = Any Amino Acid
CCEXWCCNPAXXXCTGC

SEQ ID NO: 4283 - protein, 17 aa, Artificial Sequence
  Synthetically generated peptide
  VARIANT (1)..(17): Xaa = Any Amino Acid
CCEXWCCNPAXXCXTGC

SEQ ID NO: 4284 - protein, 17 aa, Artificial Sequence
  Synthetically generated peptide
  VARIANT (1)..(17): Xaa = Any Amino Acid
CCEXWCCNPAXXCTXGC

SEQ ID NO: 4285 - protein, 17 aa, Artificial Sequence
  Synthetically generated peptide
  VARIANT (1)..(17): Xaa = Any Amino Acid
CCEXWCCNPAXXCTGXC

SEQ ID NO: 4286 - protein, 16 aa, Artificial Sequence
  Synthetically generated peptide
  VARIANT (1)..(16): Xaa = Any Amino Acid
CCEXWCCNPAXCXTGC

SEQ ID NO: 4287 - protein, 17 aa, Artificial Sequence
  Synthetically generated peptide
  VARIANT (1)..(17): Xaa = Any Amino Acid
CCEXWCCNPAXCXXTGC

SEQ ID NO: 4288 - protein, 17 aa, Artificial Sequence
  Synthetically generated peptide
  VARIANT (1)..(17): Xaa = Any Amino Acid
CCEXWCCNPAXCXTXGC

SEQ ID NO: 4289 - protein, 17 aa, Artificial Sequence
  Synthetically generated peptide
  VARIANT (1)..(17): Xaa = Any Amino Acid
CCEXWCCNPAXCXTGXC

SEQ ID NO: 4290 - protein, 16 aa, Artificial Sequence
  Synthetically generated peptide
  VARIANT (1)..(16): Xaa = Any Amino Acid
CCEXWCCNPAXCTXGC

SEQ ID NO: 4291 - protein, 17 aa, Artificial Sequence
  Synthetically generated peptide
  VARIANT (1)..(17): Xaa = Any Amino Acid
CCEXWCCNPAXCTXXGC

SEQ ID NO: 4292 - protein, 17 aa, Artificial Sequence
  Synthetically generated peptide
  VARIANT (1)..(17): Xaa = Any Amino Acid
CCEXWCCNPAXCTXGXC

SEQ ID NO: 4293 - protein, 16 aa, Artificial Sequence
  Synthetically generated peptide
  VARIANT (1)..(16): Xaa = Any Amino Acid
CCEXWCCNPAXCTGXC

SEQ ID NO: 4294 - protein, 17 aa, Artificial Sequence
  Synthetically generated peptide
  VARIANT (1)..(17): Xaa = Any Amino Acid
CCEXWCCNPAXCTGXXC

SEQ ID NO: 4295 - protein, 15 aa, Artificial Sequence
  Synthetically generated peptide
  VARIANT (1)..(15): Xaa = Any Amino Acid
CCEXWCCNPACXTGC

SEQ ID NO: 4296 - protein, 16 aa, Artificial Sequence
  Synthetically generated peptide
  VARIANT (1)..(16): Xaa = Any Amino Acid
CCEXWCCNPACXXTGC

SEQ ID NO: 4297 - protein, 17 aa, Artificial Sequence
  Synthetically generated peptide
  VARIANT (1)..(17): Xaa = Any Amino Acid
CCEXWCCNPACXXXTGC

SEQ ID NO: 4298 - protein, 17 aa, Artificial Sequence
  Synthetically generated peptide
  VARIANT (1)..(17): Xaa = Any Amino Acid
CCEXWCCNPACXXTXGC

SEQ ID NO: 4299 - protein, 17 aa, Artificial Sequence
  Synthetically generated peptide
  VARIANT (1)..(17): Xaa = Any Amino Acid
CCEXWCCNPACXXTGXC

SEQ ID NO: 4300 - protein, 16 aa, Artificial Sequence
  Synthetically generated peptide
  VARIANT (1)..(16): Xaa = Any Amino Acid
CCEXWCCNPACXTXGC

SEQ ID NO: 4301 - protein, 17 aa, Artificial Sequence
  Synthetically generated peptide
  VARIANT (1)..(17): Xaa = Any Amino Acid
CCEXWCCNPACXTXXGC

SEQ ID NO: 4302 - protein, 17 aa, Artificial Sequence
  Synthetically generated peptide
  VARIANT (1)..(17): Xaa = Any Amino Acid
CCEXWCCNPACXTXGXC

SEQ ID NO: 4303 - protein, 16 aa, Artificial Sequence
  Synthetically generated peptide
  VARIANT (1)..(16): Xaa = Any Amino Acid
CCEXWCCNPACXTGXC

SEQ ID NO: 4304 - protein, 17 aa, Artificial Sequence
  Synthetically generated peptide
  VARIANT (1)..(17): Xaa = Any Amino Acid
CCEXWCCNPACXTGXXC

SEQ ID NO: 4305 - protein, 15 aa, Artificial Sequence
  Synthetically generated peptide
  VARIANT (1)..(15): Xaa = Any Amino Acid
CCEXWCCNPACTXGC

SEQ ID NO: 4306 - protein, 16 aa, Artificial Sequence
  Synthetically generated peptide
  VARIANT (1)..(16): Xaa = Any Amino Acid
CCEXWCCNPACTXXGC

SEQ ID NO: 4307 - protein, 17 aa, Artificial Sequence
  Synthetically generated peptide
  VARIANT (1)..(17): Xaa = Any Amino Acid
CCEXWCCNPACTXXXGC

SEQ ID NO: 4308 - protein, 17 aa, Artificial Sequence
  Synthetically generated peptide
  VARIANT (1)..(17): Xaa = Any Amino Acid
CCEXWCCNPACTXXGXC

SEQ ID NO: 4309 - protein, 16 aa, Artificial Sequence
  Synthetically generated peptide
  VARIANT (1)..(16): Xaa = Any Amino Acid
CCEXWCCNPACTXGXC

SEQ ID NO: 4310 - protein, 17 aa, Artificial Sequence
  Synthetically generated peptide
  VARIANT (1)..(17): Xaa = Any Amino Acid
CCEXWCCNPACTXGXXC

SEQ ID NO: 4311 - protein, 15 aa, Artificial Sequence
  Synthetically generated peptide
  VARIANT (1)..(15): Xaa = Any Amino Acid
CCEXWCCNPACTGXC

SEQ ID NO: 4312 - protein, 16 aa, Artificial Sequence
  Synthetically generated peptide
  VARIANT (1)..(16): Xaa = Any Amino Acid
CCEXWCCNPACTGXXC

SEQ ID NO: 4313 - protein, 17 aa, Artificial Sequence
  Synthetically generated peptide
  VARIANT (1)..(17): Xaa = Any Amino Acid
CCEXWCCNPACTGXXXC

SEQ ID NO: 4314 - protein, 14 aa, Artificial Sequence
  Synthetically generated peptide
  VARIANT (1)..(14): Xaa = Any Amino Acid
CCEWXCCNPACTGC

SEQ ID NO: 4315 - protein, 15 aa, Artificial Sequence
  Synthetically generated peptide
  VARIANT (1)..(15): Xaa = Any Amino Acid
CCEWXXCCNPACTGC

SEQ ID NO: 4316 - protein, 16 aa, Artificial Sequence
  Synthetically generated peptide
  VARIANT (1)..(16): Xaa = Any Amino Acid
CCEWXXXCCNPACTGC

SEQ ID NO: 4317 - protein, 17 aa, Artificial Sequence
  Synthetically generated peptide
  VARIANT (1)..(17): Xaa = Any Amino Acid
CCEWXXXXCCNPACTGC

SEQ ID NO: 4318 - protein, 17 aa, Artificial Sequence
  Synthetically generated peptide
  VARIANT (1)..(17): Xaa = Any Amino Acid
CCEWXXXCCXNPACTGC

SEQ ID NO: 4319 - protein, 17 aa, Artificial Sequence
  Synthetically generated peptide
  VARIANT (1)..(17): Xaa = Any Amino Acid
CCEWXXXCCNXPACTGC

SEQ ID NO: 4320 - protein, 17 aa, Artificial Sequence
  Synthetically generated peptide
  VARIANT (1)..(17): Xaa = Any Amino Acid
CCEWXXXCCNPXACTGC

SEQ ID NO: 4321 - protein, 17 aa, Artificial Sequence
  Synthetically generated peptide
  VARIANT (1)..(17): Xaa = Any Amino Acid
CCEWXXXCCNPAXCTGC

SEQ ID NO: 4322 - protein, 17 aa, Artificial Sequence
  Synthetically generated peptide
  VARIANT (1)..(17): Xaa = Any Amino Acid
CCEWXXXCCNPACXTGC

SEQ ID NO: 4323 - protein, 17 aa, Artificial Sequence
  Synthetically generated peptide
  VARIANT (1)..(17): Xaa = Any Amino Acid
CCEWXXXCCNPACTXGC

SEQ ID NO: 4324 - protein, 17 aa, Artificial Sequence
  Synthetically generated peptide
  VARIANT (1)..(17): Xaa = Any Amino Acid
CCEWXXXCCNPACTGXC

SEQ ID NO: 4325 - protein, 16 aa, Artificial Sequence
  Synthetically generated peptide
  VARIANT (1)..(16): Xaa = Any Amino Acid
CCEWXXCCXNPACTGC

SEQ ID NO: 4326 - protein, 17 aa, Artificial Sequence
  Synthetically generated peptide
  VARIANT (1)..(17): Xaa = Any Amino Acid
CCEWXXCCXXNPACTGC

SEQ ID NO: 4327 - protein, 17 aa, Artificial Sequence
  Synthetically generated peptide
  VARIANT (1)..(17): Xaa = Any Amino Acid
CCEWXXCCXNXPACTGC

SEQ ID NO: 4328 - protein, 17 aa, Artificial Sequence
  Synthetically generated peptide
  VARIANT (1)..(17): Xaa = Any Amino Acid
CCEWXXCCXNPXACTGC

SEQ ID NO: 4329 - protein, 17 aa, Artificial Sequence
  Synthetically generated peptide
  VARIANT (1)..(17): Xaa = Any Amino Acid
CCEWXXCCXNPAXCTGC

SEQ ID NO: 4330 - protein, 17 aa, Artificial Sequence
  Synthetically generated peptide
  VARIANT (1)..(17): Xaa = Any Amino Acid
CCEWXXCCXNPACXTGC

SEQ ID NO: 4331 - protein, 17 aa, Artificial Sequence
  Synthetically generated peptide
  VARIANT (1)..(17): Xaa = Any Amino Acid
CCEWXXCCXNPACTXGC

SEQ ID NO: 4332 - protein, 17 aa, Artificial Sequence
  Synthetically generated peptide
  VARIANT (1)..(17): Xaa = Any Amino Acid
CCEWXXCCXNPACTGXC

SEQ ID NO: 4333 - protein, 16 aa, Artificial Sequence
  Synthetically generated peptide
  VARIANT (1)..(16): Xaa = Any Amino Acid
CCEWXXCCNXPACTGC

SEQ ID NO: 4334 - protein, 17 aa, Artificial Sequence
  Synthetically generated peptide
  VARIANT (1)..(17): Xaa = Any Amino Acid
CCEWXXCCNXXPACTGC

SEQ ID NO: 4335 - protein, 17 aa, Artificial Sequence
  Synthetically generated peptide
  VARIANT (1)..(17): Xaa = Any Amino Acid
CCEWXXCCNXPXACTGC

SEQ ID NO: 4336 - protein, 17 aa, Artificial Sequence
  Synthetically generated peptide
  VARIANT (1)..(17): Xaa = Any Amino Acid
CCEWXXCCNXPAXCTGC

SEQ ID NO: 4337 - protein, 17 aa, Artificial Sequence
  Synthetically generated peptide
  VARIANT (1)..(17): Xaa = Any Amino Acid
CCEWXXCCNXPACXTGC

SEQ ID NO: 4338 - protein, 17 aa, Artificial Sequence
  Synthetically generated peptide
  VARIANT (1)..(17): Xaa = Any Amino Acid
CCEWXXCCNXPACTXGC

SEQ ID NO: 4339 - protein, 17 aa, Artificial Sequence
  Synthetically generated peptide
  VARIANT (1)..(17): Xaa = Any Amino Acid
CCEWXXCCNXPACTGXC

SEQ ID NO: 4340 - protein, 16 aa, Artificial Sequence
  Synthetically generated peptide
  VARIANT (1)..(16): Xaa = Any Amino Acid
CCEWXXCCNPXACTGC

SEQ ID NO: 4341 - protein, 17 aa, Artificial Sequence
  Synthetically generated peptide
  VARIANT (1)..(17): Xaa = Any Amino Acid
CCEWXXCCNPXXACTGC

SEQ ID NO: 4342 - protein, 17 aa, Artificial Sequence
  Synthetically generated peptide
  VARIANT (1)..(17): Xaa = Any Amino Acid
CCEWXXCCNPXAXCTGC

SEQ ID NO: 4343 - protein, 17 aa, Artificial Sequence
  Synthetically generated peptide
  VARIANT (1)..(17): Xaa = Any Amino Acid
CCEWXXCCNPXACXTGC

SEQ ID NO: 4344 - protein, 17 aa, Artificial Sequence
  Synthetically generated peptide
  VARIANT (1)..(17): Xaa = Any Amino Acid
CCEWXXCCNPXACTXGC

SEQ ID NO: 4345 - protein, 17 aa, Artificial Sequence
  Synthetically generated peptide
  VARIANT (1)..(17): Xaa = Any Amino Acid
CCEWXXCCNPXACTGXC

SEQ ID NO: 4346 - protein, 16 aa, Artificial Sequence
  Synthetically generated peptide
  VARIANT (1)..(16): Xaa = Any Amino Acid
CCEWXXCCNPAXCTGC

SEQ ID NO: 4347 - protein, 17 aa, Artificial Sequence
  Synthetically generated peptide
  VARIANT (1)..(17): Xaa = Any Amino Acid
CCEWXXCCNPAXXCTGC

SEQ ID NO: 4348 - protein, 17 aa, Artificial Sequence
  Synthetically generated peptide
  VARIANT (1)..(17): Xaa = Any Amino Acid
CCEWXXCCNPAXCXTGC

SEQ ID NO: 4349 - protein, 17 aa, Artificial Sequence
  Synthetically generated peptide
  VARIANT (1)..(17): Xaa = Any Amino Acid
CCEWXXCCNPAXCTXGC

SEQ ID NO: 4350 - protein, 17 aa, Artificial Sequence
  Synthetically generated peptide
  VARIANT (1)..(17): Xaa = Any Amino Acid
CCEWXXCCNPAXCTGXC

SEQ ID NO: 4351 - protein, 16 aa, Artificial Sequence
  Synthetically generated peptide
  VARIANT (1)..(16): Xaa = Any Amino Acid
CCEWXXCCNPACXTGC

SEQ ID NO: 4352 - protein, 17 aa, Artificial Sequence
  Synthetically generated peptide
  VARIANT (1)..(17): Xaa = Any Amino Acid
CCEWXXCCNPACXXTGC

SEQ ID NO: 4353 - protein, 17 aa, Artificial Sequence
  Synthetically generated peptide
  VARIANT (1)..(17): Xaa = Any Amino Acid
CCEWXXCCNPACXTXGC

SEQ ID NO: 4354 - protein, 17 aa, Artificial Sequence
  Synthetically generated peptide
  VARIANT (1)..(17): Xaa = Any Amino Acid
CCEWXXCCNPACXTGXC

SEQ ID NO: 4355 - protein, 16 aa, Artificial Sequence
  Synthetically generated peptide
  VARIANT (1)..(16): Xaa = Any Amino Acid
CCEWXXCCNPACTXGC

SEQ ID NO: 4356 - protein, 17 aa, Artificial Sequence
  Synthetically generated peptide
  VARIANT (1)..(17): Xaa = Any Amino Acid
CCEWXXCCNPACTXXGC

SEQ ID NO: 4357 - protein, 17 aa, Artificial Sequence
  Synthetically generated peptide
  VARIANT (1)..(17): Xaa = Any Amino Acid
CCEWXXCCNPACTXGXC

SEQ ID NO: 4358 - protein, 16 aa, Artificial Sequence
  Synthetically generated peptide
  VARIANT (1)..(16): Xaa = Any Amino Acid
CCEWXXCCNPACTGXC

SEQ ID NO: 4359 - protein, 17 aa, Artificial Sequence
  Synthetically generated peptide
  VARIANT (1)..(17): Xaa = Any Amino Acid
CCEWXXCCNPACTGXXC

SEQ ID NO: 4360 - protein, 15 aa, Artificial Sequence
  Synthetically generated peptide
  VARIANT (1)..(15): Xaa = Any Amino Acid
CCEWXCCXNPACTGC

SEQ ID NO: 4361 - protein, 16 aa, Artificial Sequence
  Synthetically generated peptide
  VARIANT (1)..(16): Xaa = Any Amino Acid
CCEWXCCXXNPACTGC

SEQ ID NO: 4362 - protein, 17 aa, Artificial Sequence
  Synthetically generated peptide
  VARIANT (1)..(17): Xaa = Any Amino Acid
CCEWXCCXXXNPACTGC

SEQ ID NO: 4363 - protein, 17 aa, Artificial Sequence
  Synthetically generated peptide
  VARIANT (1)..(17): Xaa = Any Amino Acid
CCEWXCCXXNXPACTGC

SEQ ID NO: 4364 - protein, 17 aa, Artificial Sequence
  Synthetically generated peptide
  VARIANT (1)..(17): Xaa = Any Amino Acid
CCEWXCCXXNPXACTGC

SEQ ID NO: 4365 - protein, 17 aa, Artificial Sequence
  Synthetically generated peptide
  VARIANT (1)..(17): Xaa = Any Amino Acid
CCEWXCCXXNPAXCTGC

SEQ ID NO: 4366 - protein, 17 aa, Artificial Sequence
  Synthetically generated peptide
  VARIANT (1)..(17): Xaa = Any Amino Acid
CCEWXCCXXNPACXTGC

SEQ ID NO: 4367 - protein, 17 aa, Artificial Sequence
  Synthetically generated peptide
  VARIANT (1)..(17): Xaa = Any Amino Acid
CCEWXCCXXNPACTXGC

SEQ ID NO: 4368 - protein, 17 aa, Artificial Sequence
  Synthetically generated peptide
  VARIANT (1)..(17): Xaa = Any Amino Acid
CCEWXCCXXNPACTGXC

SEQ ID NO: 4369 - protein, 16 aa, Artificial Sequence
  Synthetically generated peptide
  VARIANT (1)..(16): Xaa = Any Amino Acid
CCEWXCCXNXPACTGC

SEQ ID NO: 4370 - protein, 17 aa, Artificial Sequence
  Synthetically generated peptide
  VARIANT (1)..(17): Xaa = Any Amino Acid
CCEWXCCXNXXPACTGC

SEQ ID NO: 4371 - protein, 17 aa, Artificial Sequence
  Synthetically generated peptide
  VARIANT (1)..(17): Xaa = Any Amino Acid
CCEWXCCXNXPXACTGC

SEQ ID NO: 4372 - protein, 17 aa, Artificial Sequence
  Synthetically generated peptide
  VARIANT (1)..(17): Xaa = Any Amino Acid
CCEWXCCXNXPAXCTGC

SEQ ID NO: 4373 - protein, 17 aa, Artificial Sequence
  Synthetically generated peptide
  VARIANT (1)..(17): Xaa = Any Amino Acid
CCEWXCCXNXPACXTGC

SEQ ID NO: 4374 - protein, 17 aa, Artificial Sequence
  Synthetically generated peptide
  VARIANT (1)..(17): Xaa = Any Amino Acid
CCEWXCCXNXPACTXGC

SEQ ID NO: 4375 - protein, 17 aa, Artificial Sequence
  Synthetically generated peptide
  VARIANT (1)..(17): Xaa = Any Amino Acid
CCEWXCCXNXPACTGXC

SEQ ID NO: 4376 - protein, 16 aa, Artificial Sequence
  Synthetically generated peptide
  VARIANT (1)..(16): Xaa = Any Amino Acid
CCEWXCCXNPXACTGC

SEQ ID NO: 4377 - protein, 17 aa, Artificial Sequence
  Synthetically generated peptide
  VARIANT (1)..(17): Xaa = Any Amino Acid
CCEWXCCXNPXXACTGC

SEQ ID NO: 4378 - protein, 17 aa, Artificial Sequence
  Synthetically generated peptide
  VARIANT (1)..(17): Xaa = Any Amino Acid
CCEWXCCXNPXAXCTGC

SEQ ID NO: 4379 - protein, 17 aa, Artificial Sequence
  Synthetically generated peptide
  VARIANT (1)..(17): Xaa = Any Amino Acid
CCEWXCCXNPXACXTGC

SEQ ID NO: 4380 - protein, 17 aa, Artificial Sequence
  Synthetically generated peptide
  VARIANT (1)..(17): Xaa = Any Amino Acid
CCEWXCCXNPXACTXGC

SEQ ID NO: 4381 - protein, 17 aa, Artificial Sequence
  Synthetically generated peptide
  VARIANT (1)..(17): Xaa = Any Amino Acid
CCEWXCCXNPXACTGXC

SEQ ID NO: 4382 - protein, 16 aa, Artificial Sequence
  Synthetically generated peptide
  VARIANT (1)..(16): Xaa = Any Amino Acid
CCEWXCCXNPAXCTGC

SEQ ID NO: 4383 - protein, 17 aa, Artificial Sequence
  Synthetically generated peptide
  VARIANT (1)..(17): Xaa = Any Amino Acid
CCEWXCCXNPAXXCTGC

SEQ ID NO: 4384 - protein, 17 aa, Artificial Sequence
  Synthetically generated peptide
  VARIANT (1)..(17): Xaa = Any Amino Acid
CCEWXCCXNPAXCXTGC

SEQ ID NO: 4385 - protein, 17 aa, Artificial Sequence
  Synthetically generated peptide
  VARIANT (1)..(17): Xaa = Any Amino Acid
CCEWXCCXNPAXCTXGC

SEQ ID NO: 4386 - protein, 17 aa, Artificial Sequence
  Synthetically generated peptide
  VARIANT (1)..(17): Xaa = Any Amino Acid
CCEWXCCXNPAXCTGXC

SEQ ID NO: 4387 - protein, 16 aa, Artificial Sequence
  Synthetically generated peptide
  VARIANT (1)..(16): Xaa = Any Amino Acid
CCEWXCCXNPACXTGC

SEQ ID NO: 4388 - protein, 17 aa, Artificial Sequence
  Synthetically generated peptide
  VARIANT (1)..(17): Xaa = Any Amino Acid
CCEWXCCXNPACXXTGC

SEQ ID NO: 4389 - protein, 17 aa, Artificial Sequence
  Synthetically generated peptide
  VARIANT (1)..(17): Xaa = Any Amino Acid
CCEWXCCXNPACXTXGC

SEQ ID NO: 4390 - protein, 17 aa, Artificial Sequence
  Synthetically generated peptide
  VARIANT (1)..(17): Xaa = Any Amino Acid
CCEWXCCXNPACXTGXC

SEQ ID NO: 4391 - protein, 16 aa, Artificial Sequence
  Synthetically generated peptide
  VARIANT (1)..(16): Xaa = Any Amino Acid
CCEWXCCXNPACTXGC

SEQ ID NO: 4392 - protein, 17 aa, Artificial Sequence
  Synthetically generated peptide
  VARIANT (1)..(17): Xaa = Any Amino Acid
CCEWXCCXNPACTXXGC

SEQ ID NO: 4393 - protein, 17 aa, Artificial Sequence
  Synthetically generated peptide
  VARIANT (1)..(17): Xaa = Any Amino Acid
CCEWXCCXNPACTXGXC

SEQ ID NO: 4394 - protein, 16 aa, Artificial Sequence
  Synthetically generated peptide
  VARIANT (1)..(16): Xaa = Any Amino Acid
CCEWXCCXNPACTGXC

SEQ ID NO: 4395 - protein, 17 aa, Artificial Sequence
  Synthetically generated peptide
  VARIANT (1)..(17): Xaa = Any Amino Acid
CCEWXCCXNPACTGXXC

SEQ ID NO: 4396 - protein, 15 aa, Artificial Sequence
  Synthetically generated peptide
  VARIANT (1)..(15): Xaa = Any Amino Acid
CCEWXCCNXPACTGC

SEQ ID NO: 4397 - protein, 16 aa, Artificial Sequence
  Synthetically generated peptide
  VARIANT (1)..(16): Xaa = Any Amino Acid
CCEWXCCNXXPACTGC

SEQ ID NO: 4398 - protein, 17 aa, Artificial Sequence
  Synthetically generated peptide
  VARIANT (1)..(17): Xaa = Any Amino Acid
CCEWXCCNXXXPACTGC

SEQ ID NO: 4399 - protein, 17 aa, Artificial Sequence
  Synthetically generated peptide
  VARIANT (1)..(17): Xaa = Any Amino Acid
CCEWXCCNXXPXACTGC

SEQ ID NO: 4400 - protein, 17 aa, Artificial Sequence
  Synthetically generated peptide
  VARIANT (1)..(17): Xaa = Any Amino Acid
CCEWXCCNXXPAXCTGC

SEQ ID NO: 4401 - protein, 17 aa, Artificial Sequence
  Synthetically generated peptide
  VARIANT (1)..(17): Xaa = Any Amino Acid
CCEWXCCNXXPACXTGC

SEQ ID NO: 4402 - protein, 17 aa, Artificial Sequence
  Synthetically generated peptide
  VARIANT (1)..(17): Xaa = Any Amino Acid
CCEWXCCNXXPACTXGC

SEQ ID NO: 4403 - protein, 17 aa, Artificial Sequence
  Synthetically generated peptide
  VARIANT (1)..(17): Xaa = Any Amino Acid
CCEWXCCNXXPACTGXC

SEQ ID NO: 4404 - protein, 16 aa, Artificial Sequence
  Synthetically generated peptide
  VARIANT (1)..(16): Xaa = Any Amino Acid
CCEWXCCNXPXACTGC

SEQ ID NO: 4405 - protein, 17 aa, Artificial Sequence
  Synthetically generated peptide
  VARIANT (1)..(17): Xaa = Any Amino Acid
CCEWXCCNXPXXACTGC

SEQ ID NO: 4406 - protein, 17 aa, Artificial Sequence
  Synthetically generated peptide
  VARIANT (1)..(17): Xaa = Any Amino Acid
CCEWXCCNXPXAXCTGC

SEQ ID NO: 4407 - protein, 17 aa, Artificial Sequence
  Synthetically generated peptide
  VARIANT (1)..(17): Xaa = Any Amino Acid
CCEWXCCNXPXACXTGC

SEQ ID NO: 4408 - protein, 17 aa, Artificial Sequence
  Synthetically generated peptide
  VARIANT (1)..(17): Xaa = Any Amino Acid
CCEWXCCNXPXACTXGC

SEQ ID NO: 4409 - protein, 17 aa, Artificial Sequence
  Synthetically generated peptide
  VARIANT (1)..(17): Xaa = Any Amino Acid
CCEWXCCNXPXACTGXC

SEQ ID NO: 4410 - protein, 16 aa, Artificial Sequence
  Synthetically generated peptide
  VARIANT (1)..(16): Xaa = Any Amino Acid
CCEWXCCNXPAXCTGC

SEQ ID NO: 4411 - protein, 17 aa, Artificial Sequence
  Synthetically generated peptide
  VARIANT (1)..(17): Xaa = Any Amino Acid
CCEWXCCNXPAXXCTGC

SEQ ID NO: 4412 - protein, 17 aa, Artificial Sequence
  Synthetically generated peptide
  VARIANT (1)..(17): Xaa = Any Amino Acid
CCEWXCCNXPAXCXTGC

SEQ ID NO: 4413 - protein, 17 aa, Artificial Sequence
  Synthetically generated peptide
  VARIANT (1)..(17): Xaa = Any Amino Acid
CCEWXCCNXPAXCTXGC

SEQ ID NO: 4414 - protein, 17 aa, Artificial Sequence
  Synthetically generated peptide
  VARIANT (1)..(17): Xaa = Any Amino Acid
CCEWXCCNXPAXCTGXC

SEQ ID NO: 4415 - protein, 16 aa, Artificial Sequence
  Synthetically generated peptide
  VARIANT (1)..(16): Xaa = Any Amino Acid
CCEWXCCNXPACXTGC

SEQ ID NO: 4416 - protein, 17 aa, Artificial Sequence
  Synthetically generated peptide
  VARIANT (1)..(17): Xaa = Any Amino Acid
CCEWXCCNXPACXXTGC

SEQ ID NO: 4417 - protein, 17 aa, Artificial Sequence
  Synthetically generated peptide
  VARIANT (1)..(17): Xaa = Any Amino Acid
CCEWXCCNXPACXTXGC

SEQ ID NO: 4418 - protein, 17 aa, Artificial Sequence
  Synthetically generated peptide
  VARIANT (1)..(17): Xaa = Any Amino Acid
CCEWXCCNXPACXTGXC

SEQ ID NO: 4419 - protein, 16 aa, Artificial Sequence
  Synthetically generated peptide
  VARIANT (1)..(16): Xaa = Any Amino Acid
CCEWXCCNXPACTXGC

SEQ ID NO: 4420 - protein, 17 aa, Artificial Sequence
  Synthetically generated peptide
  VARIANT (1)..(17): Xaa = Any Amino Acid
CCEWXCCNXPACTXXGC

SEQ ID NO: 4421 - protein, 17 aa, Artificial Sequence
  Synthetically generated peptide
  VARIANT (1)..(17): Xaa = Any Amino Acid
CCEWXCCNXPACTXGXC

SEQ ID NO: 4422 - protein, 16 aa, Artificial Sequence
  Synthetically generated peptide
  VARIANT (1)..(16): Xaa = Any Amino Acid
CCEWXCCNXPACTGXC

SEQ ID NO: 4423 - protein, 17 aa, Artificial Sequence
  Synthetically generated peptide
  VARIANT (1)..(17): Xaa = Any Amino Acid
CCEWXCCNXPACTGXXC

SEQ ID NO: 4424 - protein, 15 aa, Artificial Sequence
  Synthetically generated peptide
  VARIANT (1)..(15): Xaa = Any Amino Acid
CCEWXCCNPXACTGC

SEQ ID NO: 4425 - protein, 16 aa, Artificial Sequence
  Synthetically generated peptide
  VARIANT (1)..(16): Xaa = Any Amino Acid
CCEWXCCNPXXACTGC

SEQ ID NO: 4426 - protein, 17 aa, Artificial Sequence
  Synthetically generated peptide
  VARIANT (1)..(17): Xaa = Any Amino Acid
CCEWXCCNPXXXACTGC

SEQ ID NO: 4427 - protein, 17 aa, Artificial Sequence
  Synthetically generated peptide
  VARIANT (1)..(17): Xaa = Any Amino Acid
CCEWXCCNPXXAXCTGC

SEQ ID NO: 4428 - protein, 17 aa, Artificial Sequence
  Synthetically generated peptide
  VARIANT (1)..(17): Xaa = Any Amino Acid
CCEWXCCNPXXACXTGC

SEQ ID NO: 4429 - protein, 17 aa, Artificial Sequence
  Synthetically generated peptide
  VARIANT (1)..(17): Xaa = Any Amino Acid
CCEWXCCNPXXACTXGC

SEQ ID NO: 4430 - protein, 17 aa, Artificial Sequence
  Synthetically generated peptide
  VARIANT (1)..(17): Xaa = Any Amino Acid
CCEWXCCNPXXACTGXC

SEQ ID NO: 4431 - protein, 16 aa, Artificial Sequence
  Synthetically generated peptide
  VARIANT (1)..(16): Xaa = Any Amino Acid
CCEWXCCNPXAXCTGC

SEQ ID NO: 4432 - protein, 17 aa, Artificial Sequence
  Synthetically generated peptide
  VARIANT (1)..(17): Xaa = Any Amino Acid
CCEWXCCNPXAXXCTGC

SEQ ID NO: 4433 - protein, 17 aa, Artificial Sequence
  Synthetically generated peptide
  VARIANT (1)..(17): Xaa = Any Amino Acid
CCEWXCCNPXAXCXTGC

SEQ ID NO: 4434 - protein, 17 aa, Artificial Sequence
  Synthetically generated peptide
  VARIANT (1)..(17): Xaa = Any Amino Acid
CCEWXCCNPXAXCTXGC

SEQ ID NO: 4435 - protein, 17 aa, Artificial Sequence
  Synthetically generated peptide
  VARIANT (1)..(17): Xaa = Any Amino Acid
CCEWXCCNPXAXCTGXC

SEQ ID NO: 4436 - protein, 16 aa, Artificial Sequence
  Synthetically generated peptide
  VARIANT (1)..(16): Xaa = Any Amino Acid
CCEWXCCNPXACXTGC

SEQ ID NO: 4437 - protein, 17 aa, Artificial Sequence
  Synthetically generated peptide
  VARIANT (1)..(17): Xaa = Any Amino Acid
CCEWXCCNPXACXXTGC

SEQ ID NO: 4438 - protein, 17 aa, Artificial Sequence
  Synthetically generated peptide
  VARIANT (1)..(17): Xaa = Any Amino Acid
CCEWXCCNPXACXTXGC

SEQ ID NO: 4439 - protein, 17 aa, Artificial Sequence
  Synthetically generated peptide
  VARIANT (1)..(17): Xaa = Any Amino Acid
CCEWXCCNPXACXTGXC

SEQ ID NO: 4440 - protein, 16 aa, Artificial Sequence
  Synthetically generated peptide
  VARIANT (1)..(16): Xaa = Any Amino Acid
CCEWXCCNPXACTXGC

SEQ ID NO: 4441 - protein, 17 aa, Artificial Sequence
  Synthetically generated peptide
  VARIANT (1)..(17): Xaa = Any Amino Acid
CCEWXCCNPXACTXXGC

SEQ ID NO: 4442 - protein, 17 aa, Artificial Sequence
  Synthetically generated peptide
  VARIANT (1)..(17): Xaa = Any Amino Acid
CCEWXCCNPXACTXGXC

SEQ ID NO: 4443 - protein, 16 aa, Artificial Sequence
  Synthetically generated peptide
  VARIANT (1)..(16): Xaa = Any Amino Acid
CCEWXCCNPXACTGXC

SEQ ID NO: 4444 - protein, 17 aa, Artificial Sequence
  Synthetically generated peptide
  VARIANT (1)..(17): Xaa = Any Amino Acid
CCEWXCCNPXACTGXXC

SEQ ID NO: 4445 - protein, 15 aa, Artificial Sequence
  Synthetically generated peptide
  VARIANT (1)..(15): Xaa = Any Amino Acid
CCEWXCCNPAXCTGC

SEQ ID NO: 4446 - protein, 16 aa, Artificial Sequence
  Synthetically generated peptide
  VARIANT (1)..(16): Xaa = Any Amino Acid
CCEWXCCNPAXXCTGC

SEQ ID NO: 4447 - protein, 17 aa, Artificial Sequence
  Synthetically generated peptide
  VARIANT (1)..(17): Xaa = Any Amino Acid
CCEWXCCNPAXXXCTGC

SEQ ID NO: 4448 - protein, 17 aa, Artificial Sequence
  Synthetically generated peptide
  VARIANT (1)..(17): Xaa = Any Amino Acid
CCEWXCCNPAXXCXTGC

SEQ ID NO: 4449 - protein, 17 aa, Artificial Sequence
  Synthetically generated peptide
  VARIANT (1)..(17): Xaa = Any Amino Acid
CCEWXCCNPAXXCTXGC

SEQ ID NO: 4450 - protein, 17 aa, Artificial Sequence
  Synthetically generated peptide
  VARIANT (1)..(17): Xaa = Any Amino Acid
CCEWXCCNPAXXCTGXC

SEQ ID NO: 4451 - protein, 16 aa, Artificial Sequence
  Synthetically generated peptide
  VARIANT (1)..(16): Xaa = Any Amino Acid
CCEWXCCNPAXCXTGC

SEQ ID NO: 4452 - protein, 17 aa, Artificial Sequence
  Synthetically generated peptide
  VARIANT (1)..(17): Xaa = Any Amino Acid
CCEWXCCNPAXCXXTGC

SEQ ID NO: 4453 - protein, 17 aa, Artificial Sequence
  Synthetically generated peptide
  VARIANT (1)..(17): Xaa = Any Amino Acid
CCEWXCCNPAXCXTXGC

SEQ ID NO: 4454 - protein, 17 aa, Artificial Sequence
  Synthetically generated peptide
  VARIANT (1)..(17): Xaa = Any Amino Acid
CCEWXCCNPAXCXTGXC

SEQ ID NO: 4455 - protein, 16 aa, Artificial Sequence
  Synthetically generated peptide
  VARIANT (1)..(16): Xaa = Any Amino Acid
CCEWXCCNPAXCTXGC

SEQ ID NO: 4456 - protein, 17 aa, Artificial Sequence
  Synthetically generated peptide
  VARIANT (1)..(17): Xaa = Any Amino Acid
CCEWXCCNPAXCTXXGC

SEQ ID NO: 4457 - protein, 17 aa, Artificial Sequence
  Synthetically generated peptide
  VARIANT (1)..(17): Xaa = Any Amino Acid
CCEWXCCNPAXCTXGXC

SEQ ID NO: 4458 - protein, 16 aa, Artificial Sequence
  Synthetically generated peptide
  VARIANT (1)..(16): Xaa = Any Amino Acid
CCEWXCCNPAXCTGXC

SEQ ID NO: 4459 - protein, 17 aa, Artificial Sequence
  Synthetically generated peptide
  VARIANT (1)..(17): Xaa = Any Amino Acid
CCEWXCCNPAXCTGXXC

SEQ ID NO: 4460 - protein, 15 aa, Artificial Sequence
  Synthetically generated peptide
  VARIANT (1)..(15): Xaa = Any Amino Acid
CCEWXCCNPACXTGC

SEQ ID NO: 4461 - protein, 16 aa, Artificial Sequence
  Synthetically generated peptide
  VARIANT (1)..(16): Xaa = Any Amino Acid
CCEWXCCNPACXXTGC

SEQ ID NO: 4462 - protein, 17 aa, Artificial Sequence
  Synthetically generated peptide
  VARIANT (1)..(17): Xaa = Any Amino Acid
CCEWXCCNPACXXXTGC

SEQ ID NO: 4463 - protein, 17 aa, Artificial Sequence
  Synthetically generated peptide
  VARIANT (1)..(17): Xaa = Any Amino Acid
CCEWXCCNPACXXTXGC

SEQ ID NO: 4464 - protein, 17 aa, Artificial Sequence
  Synthetically generated peptide
  VARIANT (1)..(17): Xaa = Any Amino Acid
CCEWXCCNPACXXTGXC

SEQ ID NO: 4465 - protein, 16 aa, Artificial Sequence
  Synthetically generated peptide
  VARIANT (1)..(16): Xaa = Any Amino Acid
CCEWXCCNPACXTXGC

SEQ ID NO: 4466 - protein, 17 aa, Artificial Sequence
  Synthetically generated peptide
  VARIANT (1)..(17): Xaa = Any Amino Acid
CCEWXCCNPACXTXXGC

SEQ ID NO: 4467 - protein, 17 aa, Artificial Sequence
  Synthetically generated peptide
  VARIANT (1)..(17): Xaa = Any Amino Acid
CCEWXCCNPACXTXGXC

SEQ ID NO: 4468 - protein, 16 aa, Artificial Sequence
  Synthetically generated peptide
  VARIANT (1)..(16): Xaa = Any Amino Acid
CCEWXCCNPACXTGXC

SEQ ID NO: 4469 - protein, 17 aa, Artificial Sequence
  Synthetically generated peptide
  VARIANT (1)..(17): Xaa = Any Amino Acid
CCEWXCCNPACXTGXXC

SEQ ID NO: 4470 - protein, 15 aa, Artificial Sequence
  Synthetically generated peptide
  VARIANT (1)..(15): Xaa = Any Amino Acid
CCEWXCCNPACTXGC

SEQ ID NO: 4471 - protein, 16 aa, Artificial Sequence
  Synthetically generated peptide
  VARIANT (1)..(16): Xaa = Any Amino Acid
CCEWXCCNPACTXXGC

SEQ ID NO: 4472 - protein, 17 aa, Artificial Sequence
  Synthetically generated peptide
  VARIANT (1)..(17): Xaa = Any Amino Acid
CCEWXCCNPACTXXXGC

SEQ ID NO: 4473 - protein, 17 aa, Artificial Sequence
  Synthetically generated peptide
  VARIANT (1)..(17): Xaa = Any Amino Acid
CCEWXCCNPACTXXGXC

SEQ ID NO: 4474 - protein, 16 aa, Artificial Sequence
  Synthetically generated peptide
  VARIANT (1)..(16): Xaa = Any Amino Acid
CCEWXCCNPACTXGXC

SEQ ID NO: 4475 - protein, 17 aa, Artificial Sequence
  Synthetically generated peptide
  VARIANT (1)..(17): Xaa = Any Amino Acid
CCEWXCCNPACTXGXXC

SEQ ID NO: 4476 - protein, 15 aa, Artificial Sequence
  Synthetically generated peptide
  VARIANT (1)..(15): Xaa = Any Amino Acid
CCEWXCCNPACTGXC

SEQ ID NO: 4477 - protein, 16 aa, Artificial Sequence
  Synthetically generated peptide
  VARIANT (1)..(16): Xaa = Any Amino Acid
CCEWXCCNPACTGXXC

SEQ ID NO: 4478 - protein, 17 aa, Artificial Sequence
  Synthetically generated peptide
  VARIANT (1)..(17): Xaa = Any Amino Acid
CCEWXCCNPACTGXXXC

SEQ ID NO: 4479 - protein, 14 aa, Artificial Sequence
  Synthetically generated peptide
  VARIANT (1)..(14): Xaa = Any Amino Acid
CCEWCCXNPACTGC

SEQ ID NO: 4480 - protein, 15 aa, Artificial Sequence
  Synthetically generated peptide
  VARIANT (1)..(15): Xaa = Any Amino Acid
CCEWCCXXNPACTGC

SEQ ID NO: 4481 - protein, 16 aa, Artificial Sequence
  Synthetically generated peptide
  VARIANT (1)..(16): Xaa = Any Amino Acid
CCEWCCXXXNPACTGC

SEQ ID NO: 4482 - protein, 17 aa, Artificial Sequence
  Synthetically generated peptide
  VARIANT (1)..(17): Xaa = Any Amino Acid
CCEWCCXXXXNPACTGC

SEQ ID NO: 4483 - protein, 17 aa, Artificial Sequence
  Synthetically generated peptide
  VARIANT (1)..(17): Xaa = Any Amino Acid
CCEWCCXXXNXPACTGC

SEQ ID NO: 4484 - protein, 17 aa, Artificial Sequence
  Synthetically generated peptide
  VARIANT (1)..(17): Xaa = Any Amino Acid
CCEWCCXXXNPXACTGC

SEQ ID NO: 4485 - protein, 17 aa, Artificial Sequence
  Synthetically generated peptide
  VARIANT (1)..(17): Xaa = Any Amino Acid
CCEWCCXXXNPAXCTGC

SEQ ID NO: 4486 - protein, 17 aa, Artificial Sequence
  Synthetically generated peptide
  VARIANT (1)..(17): Xaa = Any Amino Acid
CCEWCCXXXNPACXTGC

SEQ ID NO: 4487 - protein, 17 aa, Artificial Sequence
  Synthetically generated peptide
  VARIANT (1)..(17): Xaa = Any Amino Acid
CCEWCCXXXNPACTXGC

SEQ ID NO: 4488 - protein, 17 aa, Artificial Sequence
  Synthetically generated peptide
  VARIANT (1)..(17): Xaa = Any Amino Acid
CCEWCCXXXNPACTGXC

SEQ ID NO: 4489 - protein, 16 aa, Artificial Sequence
  Synthetically generated peptide
  VARIANT (1)..(16): Xaa = Any Amino Acid
CCEWCCXXNXPACTGC

SEQ ID NO: 4490 - protein, 17 aa, Artificial Sequence
  Synthetically generated peptide
  VARIANT (1)..(17): Xaa = Any Amino Acid
CCEWCCXXNXXPACTGC

SEQ ID NO: 4491 - protein, 17 aa, Artificial Sequence
  Synthetically generated peptide
  VARIANT (1)..(17): Xaa = Any Amino Acid
CCEWCCXXNXPXACTGC

SEQ ID NO: 4492 - protein, 17 aa, Artificial Sequence
  Synthetically generated peptide
  VARIANT (1)..(17): Xaa = Any Amino Acid
CCEWCCXXNXPAXCTGC

SEQ ID NO: 4493 - protein, 17 aa, Artificial Sequence
  Synthetically generated peptide
  VARIANT (1)..(17): Xaa = Any Amino Acid
CCEWCCXXNXPACXTGC

SEQ ID NO: 4494 - protein, 17 aa, Artificial Sequence
  Synthetically generated peptide
  VARIANT (1)..(17): Xaa = Any Amino Acid
CCEWCCXXNXPACTXGC

SEQ ID NO: 4495 - protein, 17 aa, Artificial Sequence
  Synthetically generated peptide
  VARIANT (1)..(17): Xaa = Any Amino Acid
CCEWCCXXNXPACTGXC

SEQ ID NO: 4496 - protein, 16 aa, Artificial Sequence
  Synthetically generated peptide
  VARIANT (1)..(16): Xaa = Any Amino Acid
CCEWCCXXNPXACTGC

SEQ ID NO: 4497 - protein, 17 aa, Artificial Sequence
  Synthetically generated peptide
  VARIANT (1)..(17): Xaa = Any Amino Acid
CCEWCCXXNPXXACTGC

SEQ ID NO: 4498 - protein, 17 aa, Artificial Sequence
  Synthetically generated peptide
  VARIANT (1)..(17): Xaa = Any Amino Acid
CCEWCCXXNPXAXCTGC

SEQ ID NO: 4499 - protein, 17 aa, Artificial Sequence
  Synthetically generated peptide
  VARIANT (1)..(17): Xaa = Any Amino Acid
CCEWCCXXNPXACXTGC

SEQ ID NO: 4500 - protein, 17 aa, Artificial Sequence
  Synthetically generated peptide
  VARIANT (1)..(17): Xaa = Any Amino Acid
CCEWCCXXNPXACTXGC

SEQ ID NO: 4501 - protein, 17 aa, Artificial Sequence
  Synthetically generated peptide
  VARIANT (1)..(17): Xaa = Any Amino Acid
CCEWCCXXNPXACTGXC

SEQ ID NO: 4502 - protein, 16 aa, Artificial Sequence
  Synthetically generated peptide
  VARIANT (1)..(16): Xaa = Any Amino Acid
CCEWCCXXNPAXCTGC

SEQ ID NO: 4503 - protein, 17 aa, Artificial Sequence
  Synthetically generated peptide
  VARIANT (1)..(17): Xaa = Any Amino Acid
CCEWCCXXNPAXXCTGC

SEQ ID NO: 4504 - protein, 17 aa, Artificial Sequence
  Synthetically generated peptide
  VARIANT (1)..(17): Xaa = Any Amino Acid
CCEWCCXXNPAXCXTGC

SEQ ID NO: 4505 - protein, 17 aa, Artificial Sequence
  Synthetically generated peptide
  VARIANT (1)..(17): Xaa = Any Amino Acid
CCEWCCXXNPAXCTXGC

SEQ ID NO: 4506 - protein, 17 aa, Artificial Sequence
  Synthetically generated peptide
  VARIANT (1)..(17): Xaa = Any Amino Acid
CCEWCCXXNPAXCTGXC

SEQ ID NO: 4507 - protein, 16 aa, Artificial Sequence
  Synthetically generated peptide
  VARIANT (1)..(16): Xaa = Any Amino Acid
CCEWCCXXNPACXTGC

SEQ ID NO: 4508 - protein, 17 aa, Artificial Sequence
  Synthetically generated peptide
  VARIANT (1)..(17): Xaa = Any Amino Acid
CCEWCCXXNPACXXTGC

SEQ ID NO: 4509 - protein, 17 aa, Artificial Sequence
  Synthetically generated peptide
  VARIANT (1)..(17): Xaa = Any Amino Acid
CCEWCCXXNPACXTXGC

SEQ ID NO: 4510 - protein, 17 aa, Artificial Sequence
  Synthetically generated peptide
  VARIANT (1)..(17): Xaa = Any Amino Acid
CCEWCCXXNPACXTGXC

SEQ ID NO: 4511 - protein, 16 aa, Artificial Sequence
  Synthetically generated peptide
  VARIANT (1)..(16): Xaa = Any Amino Acid
CCEWCCXXNPACTXGC

SEQ ID NO: 4512 - protein, 17 aa, Artificial Sequence
  Synthetically generated peptide
  VARIANT (1)..(17): Xaa = Any Amino Acid
CCEWCCXXNPACTXXGC

SEQ ID NO: 4513 - protein, 17 aa, Artificial Sequence
  Synthetically generated peptide
  VARIANT (1)..(17): Xaa = Any Amino Acid
CCEWCCXXNPACTXGXC

SEQ ID NO: 4514 - protein, 16 aa, Artificial Sequence
  Synthetically generated peptide
  VARIANT (1)..(16): Xaa = Any Amino Acid
CCEWCCXXNPACTGXC

SEQ ID NO: 4515 - protein, 17 aa, Artificial Sequence
  Synthetically generated peptide
  VARIANT (1)..(17): Xaa = Any Amino Acid
CCEWCCXXNPACTGXXC

SEQ ID NO: 4516 - protein, 15 aa, Artificial Sequence
  Synthetically generated peptide
  VARIANT (1)..(15): Xaa = Any Amino Acid
CCEWCCXNXPACTGC

SEQ ID NO: 4517 - protein, 16 aa, Artificial Sequence
  Synthetically generated peptide
  VARIANT (1)..(16): Xaa = Any Amino Acid
CCEWCCXNXXPACTGC

SEQ ID NO: 4518 - protein, 17 aa, Artificial Sequence
  Synthetically generated peptide
  VARIANT (1)..(17): Xaa = Any Amino Acid
CCEWCCXNXXXPACTGC

SEQ ID NO: 4519 - protein, 17 aa, Artificial Sequence
  Synthetically generated peptide
  VARIANT (1)..(17): Xaa = Any Amino Acid
CCEWCCXNXXPXACTGC

SEQ ID NO: 4520 - protein, 17 aa, Artificial Sequence
  Synthetically generated peptide
  VARIANT (1)..(17): Xaa = Any Amino Acid
CCEWCCXNXXPAXCTGC

SEQ ID NO: 4521 - protein, 17 aa, Artificial Sequence
  Synthetically generated peptide
  VARIANT (1)..(17): Xaa = Any Amino Acid
CCEWCCXNXXPACXTGC

SEQ ID NO: 4522 - protein, 17 aa, Artificial Sequence
  Synthetically generated peptide
  VARIANT (1)..(17): Xaa = Any Amino Acid
CCEWCCXNXXPACTXGC

SEQ ID NO: 4523 - protein, 17 aa, Artificial Sequence
  Synthetically generated peptide
  VARIANT (1)..(17): Xaa = Any Amino Acid
CCEWCCXNXXPACTGXC

SEQ ID NO: 4524 - protein, 16 aa, Artificial Sequence
  Synthetically generated peptide
  VARIANT (1)..(16): Xaa = Any Amino Acid
CCEWCCXNXPXACTGC

SEQ ID NO: 4525 - protein, 17 aa, Artificial Sequence
  Synthetically generated peptide
  VARIANT (1)..(17): Xaa = Any Amino Acid
CCEWCCXNXPXXACTGC

SEQ ID NO: 4526 - protein, 17 aa, Artificial Sequence
  Synthetically generated peptide
  VARIANT (1)..(17): Xaa = Any Amino Acid
CCEWCCXNXPXAXCTGC

SEQ ID NO: 4527 - protein, 17 aa, Artificial Sequence
  Synthetically generated peptide
  VARIANT (1)..(17): Xaa = Any Amino Acid
CCEWCCXNXPXACXTGC

SEQ ID NO: 4528 - protein, 17 aa, Artificial Sequence
  Synthetically generated peptide
  VARIANT (1)..(17): Xaa = Any Amino Acid
CCEWCCXNXPXACTXGC

SEQ ID NO: 4529 - protein, 17 aa, Artificial Sequence
  Synthetically generated peptide
  VARIANT (1)..(17): Xaa = Any Amino Acid
CCEWCCXNXPXACTGXC

SEQ ID NO: 4530 - protein, 16 aa, Artificial Sequence
  Synthetically generated peptide
  VARIANT (1)..(16): Xaa = Any Amino Acid
CCEWCCXNXPAXCTGC

SEQ ID NO: 4531 - protein, 17 aa, Artificial Sequence
  Synthetically generated peptide
  VARIANT (1)..(17): Xaa = Any Amino Acid
CCEWCCXNXPAXXCTGC

SEQ ID NO: 4532 - protein, 17 aa, Artificial Sequence
  Synthetically generated peptide
  VARIANT (1)..(17): Xaa = Any Amino Acid
CCEWCCXNXPAXCXTGC

SEQ ID NO: 4533 - protein, 17 aa, Artificial Sequence
  Synthetically generated peptide
  VARIANT (1)..(17): Xaa = Any Amino Acid
CCEWCCXNXPAXCTXGC

SEQ ID NO: 4534 - protein, 17 aa, Artificial Sequence
  Synthetically generated peptide
  VARIANT (1)..(17): Xaa = Any Amino Acid
CCEWCCXNXPAXCTGXC

SEQ ID NO: 4535 - protein, 16 aa, Artificial Sequence
  Synthetically generated peptide
  VARIANT (1)..(16): Xaa = Any Amino Acid
CCEWCCXNXPACXTGC

SEQ ID NO: 4536 - protein, 17 aa, Artificial Sequence
  Synthetically generated peptide
  VARIANT (1)..(17): Xaa = Any Amino Acid
CCEWCCXNXPACXXTGC

SEQ ID NO: 4537 - protein, 17 aa, Artificial Sequence
  Synthetically generated peptide
  VARIANT (1)..(17): Xaa = Any Amino Acid
CCEWCCXNXPACXTXGC

SEQ ID NO: 4538 - protein, 17 aa, Artificial Sequence
  Synthetically generated peptide
  VARIANT (1)..(17): Xaa = Any Amino Acid
CCEWCCXNXPACXTGXC

SEQ ID NO: 4539 - protein, 16 aa, Artificial Sequence
  Synthetically generated peptide
  VARIANT (1)..(16): Xaa = Any Amino Acid
CCEWCCXNXPACTXGC

SEQ ID NO: 4540 - protein, 17 aa, Artificial Sequence
  Synthetically generated peptide
  VARIANT (1)..(17): Xaa = Any Amino Acid
CCEWCCXNXPACTXXGC

SEQ ID NO: 4541 - protein, 17 aa, Artificial Sequence
  Synthetically generated peptide
  VARIANT (1)..(17): Xaa = Any Amino Acid
CCEWCCXNXPACTXGXC

SEQ ID NO: 4542 - protein, 16 aa, Artificial Sequence
  Synthetically generated peptide
  VARIANT (1)..(16): Xaa = Any Amino Acid
CCEWCCXNXPACTGXC

SEQ ID NO: 4543 - protein, 17 aa, Artificial Sequence
  Synthetically generated peptide
  VARIANT (1)..(17): Xaa = Any Amino Acid
CCEWCCXNXPACTGXXC

SEQ ID NO: 4544 - protein, 15 aa, Artificial Sequence
  Synthetically generated peptide
  VARIANT (1)..(15): Xaa = Any Amino Acid
CCEWCCXNPXACTGC

SEQ ID NO: 4545 - protein, 16 aa, Artificial Sequence
  Synthetically generated peptide
  VARIANT (1)..(16): Xaa = Any Amino Acid
CCEWCCXNPXXACTGC

SEQ ID NO: 4546 - protein, 17 aa, Artificial Sequence
  Synthetically generated peptide
  VARIANT (1)..(17): Xaa = Any Amino Acid
CCEWCCXNPXXXACTGC

SEQ ID NO: 4547 - protein, 17 aa, Artificial Sequence
  Synthetically generated peptide
  VARIANT (1)..(17): Xaa = Any Amino Acid
CCEWCCXNPXXAXCTGC

SEQ ID NO: 4548 - protein, 17 aa, Artificial Sequence
  Synthetically generated peptide
  VARIANT (1)..(17): Xaa = Any Amino Acid
CCEWCCXNPXXACXTGC

SEQ ID NO: 4549 - protein, 17 aa, Artificial Sequence
  Synthetically generated peptide
  VARIANT (1)..(17): Xaa = Any Amino Acid
CCEWCCXNPXXACTXGC

SEQ ID NO: 4550 - protein, 17 aa, Artificial Sequence
  Synthetically generated peptide
  VARIANT (1)..(17): Xaa = Any Amino Acid
CCEWCCXNPXXACTGXC

SEQ ID NO: 4551 - protein, 16 aa, Artificial Sequence
  Synthetically generated peptide
  VARIANT (1)..(16): Xaa = Any Amino Acid
CCEWCCXNPXAXCTGC

SEQ ID NO: 4552 - protein, 17 aa, Artificial Sequence
  Synthetically generated peptide
  VARIANT (1)..(17): Xaa = Any Amino Acid
CCEWCCXNPXAXXCTGC

SEQ ID NO: 4553 - protein, 17 aa, Artificial Sequence
  Synthetically generated peptide
  VARIANT (1)..(17): Xaa = Any Amino Acid
CCEWCCXNPXAXCXTGC

SEQ ID NO: 4554 - protein, 17 aa, Artificial Sequence
  Synthetically generated peptide
  VARIANT (1)..(17): Xaa = Any Amino Acid
CCEWCCXNPXAXCTXGC

SEQ ID NO: 4555 - protein, 17 aa, Artificial Sequence
  Synthetically generated peptide
  VARIANT (1)..(17): Xaa = Any Amino Acid
CCEWCCXNPXAXCTGXC

SEQ ID NO: 4556 - protein, 16 aa, Artificial Sequence
  Synthetically generated peptide
  VARIANT (1)..(16): Xaa = Any Amino Acid
CCEWCCXNPXACXTGC

SEQ ID NO: 4557 - protein, 17 aa, Artificial Sequence
  Synthetically generated peptide
  VARIANT (1)..(17): Xaa = Any Amino Acid
CCEWCCXNPXACXXTGC

SEQ ID NO: 4558 - protein, 17 aa, Artificial Sequence
  Synthetically generated peptide
  VARIANT (1)..(17): Xaa = Any Amino Acid
CCEWCCXNPXACXTXGC

SEQ ID NO: 4559 - protein, 17 aa, Artificial Sequence
  Synthetically generated peptide
  VARIANT (1)..(17): Xaa = Any Amino Acid
CCEWCCXNPXACXTGXC

SEQ ID NO: 4560 - protein, 16 aa, Artificial Sequence
  Synthetically generated peptide
  VARIANT (1)..(16): Xaa = Any Amino Acid
CCEWCCXNPXACTXGC

SEQ ID NO: 4561 - protein, 17 aa, Artificial Sequence
  Synthetically generated peptide
  VARIANT (1)..(17): Xaa = Any Amino Acid
CCEWCCXNPXACTXXGC

SEQ ID NO: 4562 - protein, 17 aa, Artificial Sequence
  Synthetically generated peptide
  VARIANT (1)..(17): Xaa = Any Amino Acid
CCEWCCXNPXACTXGXC

SEQ ID NO: 4563 - protein, 16 aa, Artificial Sequence
  Synthetically generated peptide
  VARIANT (1)..(16): Xaa = Any Amino Acid
CCEWCCXNPXACTGXC

SEQ ID NO: 4564 - protein, 17 aa, Artificial Sequence
  Synthetically generated peptide
  VARIANT (1)..(17): Xaa = Any Amino Acid
CCEWCCXNPXACTGXXC

SEQ ID NO: 4565 - protein, 15 aa, Artificial Sequence
  Synthetically generated peptide
  VARIANT (1)..(15): Xaa = Any Amino Acid
CCEWCCXNPAXCTGC

SEQ ID NO: 4566 - protein, 16 aa, Artificial Sequence
  Synthetically generated peptide
  VARIANT (1)..(16): Xaa = Any Amino Acid
CCEWCCXNPAXXCTGC

SEQ ID NO: 4567 - protein, 17 aa, Artificial Sequence
  Synthetically generated peptide
  VARIANT (1)..(17): Xaa = Any Amino Acid
CCEWCCXNPAXXXCTGC

SEQ ID NO: 4568 - protein, 17 aa, Artificial Sequence
  Synthetically generated peptide
  VARIANT (1)..(17): Xaa = Any Amino Acid
CCEWCCXNPAXXCXTGC

SEQ ID NO: 4569 - protein, 17 aa, Artificial Sequence
  Synthetically generated peptide
  VARIANT (1)..(17): Xaa = Any Amino Acid
CCEWCCXNPAXXCTXGC

SEQ ID NO: 4570 - protein, 17 aa, Artificial Sequence
  Synthetically generated peptide
  VARIANT (1)..(17): Xaa = Any Amino Acid
CCEWCCXNPAXXCTGXC

SEQ ID NO: 4571 - protein, 16 aa, Artificial Sequence
  Synthetically generated peptide
  VARIANT (1)..(16): Xaa = Any Amino Acid
CCEWCCXNPAXCXTGC

SEQ ID NO: 4572 - protein, 17 aa, Artificial Sequence
  Synthetically generated peptide
  VARIANT (1)..(17): Xaa = Any Amino Acid
CCEWCCXNPAXCXXTGC

SEQ ID NO: 4573 - protein, 17 aa, Artificial Sequence
  Synthetically generated peptide
  VARIANT (1)..(17): Xaa = Any Amino Acid
CCEWCCXNPAXCXTXGC

SEQ ID NO: 4574 - protein, 17 aa, Artificial Sequence
  Synthetically generated peptide
  VARIANT (1)..(17): Xaa = Any Amino Acid
CCEWCCXNPAXCXTGXC

SEQ ID NO: 4575 - protein, 16 aa, Artificial Sequence
  Synthetically generated peptide
  VARIANT (1)..(16): Xaa = Any Amino Acid
CCEWCCXNPAXCTXGC

SEQ ID NO: 4576 - protein, 17 aa, Artificial Sequence
  Synthetically generated peptide
  VARIANT (1)..(17): Xaa = Any Amino Acid
CCEWCCXNPAXCTXXGC

SEQ ID NO: 4577 - protein, 17 aa, Artificial Sequence
  Synthetically generated peptide
  VARIANT (1)..(17): Xaa = Any Amino Acid
CCEWCCXNPAXCTXGXC

SEQ ID NO: 4578 - protein, 16 aa, Artificial Sequence
  Synthetically generated peptide
  VARIANT (1)..(16): Xaa = Any Amino Acid
CCEWCCXNPAXCTGXC

SEQ ID NO: 4579 - protein, 17 aa, Artificial Sequence
  Synthetically generated peptide
  VARIANT (1)..(17): Xaa = Any Amino Acid
CCEWCCXNPAXCTGXXC

SEQ ID NO: 4580 - protein, 15 aa, Artificial Sequence
  Synthetically generated peptide
  VARIANT (1)..(15): Xaa = Any Amino Acid
CCEWCCXNPACXTGC

SEQ ID NO: 4581 - protein, 16 aa, Artificial Sequence
  Synthetically generated peptide
  VARIANT (1)..(16): Xaa = Any Amino Acid
CCEWCCXNPACXXTGC

SEQ ID NO: 4582 - protein, 17 aa, Artificial Sequence
  Synthetically generated peptide
  VARIANT (1)..(17): Xaa = Any Amino Acid
CCEWCCXNPACXXXTGC

SEQ ID NO: 4583 - protein, 17 aa, Artificial Sequence
  Synthetically generated peptide
  VARIANT (1)..(17): Xaa = Any Amino Acid
CCEWCCXNPACXXTXGC

SEQ ID NO: 4584 - protein, 17 aa, Artificial Sequence
  Synthetically generated peptide
  VARIANT (1)..(17): Xaa = Any Amino Acid
CCEWCCXNPACXXTGXC

SEQ ID NO: 4585 - protein, 16 aa, Artificial Sequence
  Synthetically generated peptide
  VARIANT (1)..(16): Xaa = Any Amino Acid
CCEWCCXNPACXTXGC

SEQ ID NO: 4586 - protein, 17 aa, Artificial Sequence
  Synthetically generated peptide
  VARIANT (1)..(17): Xaa = Any Amino Acid
CCEWCCXNPACXTXXGC

SEQ ID NO: 4587 - protein, 17 aa, Artificial Sequence
  Synthetically generated peptide
  VARIANT (1)..(17): Xaa = Any Amino Acid
CCEWCCXNPACXTXGXC

SEQ ID NO: 4588 - protein, 16 aa, Artificial Sequence
  Synthetically generated peptide
  VARIANT (1)..(16): Xaa = Any Amino Acid
CCEWCCXNPACXTGXC

SEQ ID NO: 4589 - protein, 17 aa, Artificial Sequence
  Synthetically generated peptide
  VARIANT (1)..(17): Xaa = Any Amino Acid
CCEWCCXNPACXTGXXC

SEQ ID NO: 4590 - protein, 15 aa, Artificial Sequence
  Synthetically generated peptide
  VARIANT (1)..(15): Xaa = Any Amino Acid
CCEWCCXNPACTXGC

SEQ ID NO: 4591 - protein, 16 aa, Artificial Sequence
  Synthetically generated peptide
  VARIANT (1)..(16): Xaa = Any Amino Acid
CCEWCCXNPACTXXGC

SEQ ID NO: 4592 - protein, 17 aa, Artificial Sequence
  Synthetically generated peptide
  VARIANT (1)..(17): Xaa = Any Amino Acid
CCEWCCXNPACTXXXGC

SEQ ID NO: 4593 - protein, 17 aa, Artificial Sequence
  Synthetically generated peptide
  VARIANT (1)..(17): Xaa = Any Amino Acid
CCEWCCXNPACTXXGXC

SEQ ID NO: 4594 - protein, 16 aa, Artificial Sequence
  Synthetically generated peptide
  VARIANT (1)..(16): Xaa = Any Amino Acid
CCEWCCXNPACTXGXC

SEQ ID NO: 4595 - protein, 17 aa, Artificial Sequence
  Synthetically generated peptide
  VARIANT (1)..(17): Xaa = Any Amino Acid
CCEWCCXNPACTXGXXC

SEQ ID NO: 4596 - protein, 15 aa, Artificial Sequence
  Synthetically generated peptide
  VARIANT (1)..(15): Xaa = Any Amino Acid
CCEWCCXNPACTGXC

SEQ ID NO: 4597 - protein, 16 aa, Artificial Sequence
  Synthetically generated peptide
  VARIANT (1)..(16): Xaa = Any Amino Acid
CCEWCCXNPACTGXXC

SEQ ID NO: 4598 - protein, 17 aa, Artificial Sequence
  Synthetically generated peptide
  VARIANT (1)..(17): Xaa = Any Amino Acid
CCEWCCXNPACTGXXXC

SEQ ID NO: 4599 - protein, 14 aa, Artificial Sequence
  Synthetically generated peptide
  VARIANT (1)..(14): Xaa = Any Amino Acid
CCEWCCNXPACTGC

SEQ ID NO: 4600 - protein, 15 aa, Artificial Sequence
  Synthetically generated peptide
  VARIANT (1)..(15): Xaa = Any Amino Acid
CCEWCCNXXPACTGC

SEQ ID NO: 4601 - protein, 16 aa, Artificial Sequence
  Synthetically generated peptide
  VARIANT (1)..(16): Xaa = Any Amino Acid
CCEWCCNXXXPACTGC

SEQ ID NO: 4602 - protein, 17 aa, Artificial Sequence
  Synthetically generated peptide
  VARIANT (1)..(17): Xaa = Any Amino Acid
CCEWCCNXXXXPACTGC

SEQ ID NO: 4603 - protein, 17 aa, Artificial Sequence
  Synthetically generated peptide
  VARIANT (1)..(17): Xaa = Any Amino Acid
CCEWCCNXXXPXACTGC

SEQ ID NO: 4604 - protein, 17 aa, Artificial Sequence
  Synthetically generated peptide
  VARIANT (1)..(17): Xaa = Any Amino Acid
CCEWCCNXXXPAXCTGC

SEQ ID NO: 4605 - protein, 17 aa, Artificial Sequence
  Synthetically generated peptide
  VARIANT (1)..(17): Xaa = Any Amino Acid
CCEWCCNXXXPACXTGC

SEQ ID NO: 4606 - protein, 17 aa, Artificial Sequence
  Synthetically generated peptide
  VARIANT (1)..(17): Xaa = Any Amino Acid
CCEWCCNXXXPACTXGC

SEQ ID NO: 4607 - protein, 17 aa, Artificial Sequence
  Synthetically generated peptide
  VARIANT (1)..(17): Xaa = Any Amino Acid
CCEWCCNXXXPACTGXC

SEQ ID NO: 4608 - protein, 16 aa, Artificial Sequence
  Synthetically generated peptide
  VARIANT (1)..(16): Xaa = Any Amino Acid
CCEWCCNXXPXACTGC

SEQ ID NO: 4609 - protein, 17 aa, Artificial Sequence
  Synthetically generated peptide
  VARIANT (1)..(17): Xaa = Any Amino Acid
CCEWCCNXXPXXACTGC

SEQ ID NO: 4610 - protein, 17 aa, Artificial Sequence
  Synthetically generated peptide
  VARIANT (1)..(17): Xaa = Any Amino Acid
CCEWCCNXXPXAXCTGC

SEQ ID NO: 4611 - protein, 17 aa, Artificial Sequence
  Synthetically generated peptide
  VARIANT (1)..(17): Xaa = Any Amino Acid
CCEWCCNXXPXACXTGC

SEQ ID NO: 4612 - protein, 17 aa, Artificial Sequence
  Synthetically generated peptide
  VARIANT (1)..(17): Xaa = Any Amino Acid
CCEWCCNXXPXACTXGC

SEQ ID NO: 4613 - protein, 17 aa, Artificial Sequence
  Synthetically generated peptide
  VARIANT (1)..(17): Xaa = Any Amino Acid
CCEWCCNXXPXACTGXC

SEQ ID NO: 4614 - protein, 16 aa, Artificial Sequence
  Synthetically generated peptide
  VARIANT (1)..(16): Xaa = Any Amino Acid
CCEWCCNXXPAXCTGC

SEQ ID NO: 4615 - protein, 17 aa, Artificial Sequence
  Synthetically generated peptide
  VARIANT (1)..(17): Xaa = Any Amino Acid
CCEWCCNXXPAXXCTGC

SEQ ID NO: 4616 - protein, 17 aa, Artificial Sequence
  Synthetically generated peptide
  VARIANT (1)..(17): Xaa = Any Amino Acid
CCEWCCNXXPAXCXTGC

SEQ ID NO: 4617 - protein, 17 aa, Artificial Sequence
  Synthetically generated peptide
  VARIANT (1)..(17): Xaa = Any Amino Acid
CCEWCCNXXPAXCTXGC

SEQ ID NO: 4618 - protein, 17 aa, Artificial Sequence
  Synthetically generated peptide
  VARIANT (1)..(17): Xaa = Any Amino Acid
CCEWCCNXXPAXCTGXC

SEQ ID NO: 4619 - protein, 16 aa, Artificial Sequence
  Synthetically generated peptide
  VARIANT (1)..(16): Xaa = Any Amino Acid
CCEWCCNXXPACXTGC

SEQ ID NO: 4620 - protein, 17 aa, Artificial Sequence
  Synthetically generated peptide
  VARIANT (1)..(17): Xaa = Any Amino Acid
CCEWCCNXXPACXXTGC

SEQ ID NO: 4621 - protein, 17 aa, Artificial Sequence
  Synthetically generated peptide
  VARIANT (1)..(17): Xaa = Any Amino Acid
CCEWCCNXXPACXTXGC

SEQ ID NO: 4622 - protein, 17 aa, Artificial Sequence
  Synthetically generated peptide
  VARIANT (1)..(17): Xaa = Any Amino Acid
CCEWCCNXXPACXTGXC

SEQ ID NO: 4623 - protein, 16 aa, Artificial Sequence
  Synthetically generated peptide
  VARIANT (1)..(16): Xaa = Any Amino Acid
CCEWCCNXXPACTXGC

SEQ ID NO: 4624 - protein, 17 aa, Artificial Sequence
  Synthetically generated peptide
  VARIANT (1)..(17): Xaa = Any Amino Acid
CCEWCCNXXPACTXXGC

SEQ ID NO: 4625 - protein, 17 aa, Artificial Sequence
  Synthetically generated peptide
  VARIANT (1)..(17): Xaa = Any Amino Acid
CCEWCCNXXPACTXGXC

SEQ ID NO: 4626 - protein, 16 aa, Artificial Sequence
  Synthetically generated peptide
  VARIANT (1)..(16): Xaa = Any Amino Acid
CCEWCCNXXPACTGXC

SEQ ID NO: 4627 - protein, 17 aa, Artificial Sequence
  Synthetically generated peptide
  VARIANT (1)..(17): Xaa = Any Amino Acid
CCEWCCNXXPACTGXXC

SEQ ID NO: 4628 - protein, 15 aa, Artificial Sequence
  Synthetically generated peptide
  VARIANT (1)..(15): Xaa = Any Amino Acid
CCEWCCNXPXACTGC

SEQ ID NO: 4629 - protein, 16 aa, Artificial Sequence
  Synthetically generated peptide
  VARIANT (1)..(16): Xaa = Any Amino Acid
CCEWCCNXPXXACTGC

SEQ ID NO: 4630 - protein, 17 aa, Artificial Sequence
  Synthetically generated peptide
  VARIANT (1)..(17): Xaa = Any Amino Acid
CCEWCCNXPXXXACTGC

SEQ ID NO: 4631 - protein, 17 aa, Artificial Sequence
  Synthetically generated peptide
  VARIANT (1)..(17): Xaa = Any Amino Acid
CCEWCCNXPXXAXCTGC

SEQ ID NO: 4632 - protein, 17 aa, Artificial Sequence
  Synthetically generated peptide
  VARIANT (1)..(17): Xaa = Any Amino Acid
CCEWCCNXPXXACXTGC

SEQ ID NO: 4633 - protein, 17 aa, Artificial Sequence
  Synthetically generated peptide
  VARIANT (1)..(17): Xaa = Any Amino Acid
CCEWCCNXPXXACTXGC

SEQ ID NO: 4634 - protein, 17 aa, Artificial Sequence
  Synthetically generated peptide
  VARIANT (1)..(17): Xaa = Any Amino Acid
CCEWCCNXPXXACTGXC

SEQ ID NO: 4635 - protein, 16 aa, Artificial Sequence
  Synthetically generated peptide
  VARIANT (1)..(16): Xaa = Any Amino Acid
CCEWCCNXPXAXCTGC

SEQ ID NO: 4636 - protein, 17 aa, Artificial Sequence
  Synthetically generated peptide
  VARIANT (1)..(17): Xaa = Any Amino Acid
CCEWCCNXPXAXXCTGC

SEQ ID NO: 4637 - protein, 17 aa, Artificial Sequence
  Synthetically generated peptide
  VARIANT (1)..(17): Xaa = Any Amino Acid
CCEWCCNXPXAXCXTGC

SEQ ID NO: 4638 - protein, 17 aa, Artificial Sequence
  Synthetically generated peptide
  VARIANT (1)..(17): Xaa = Any Amino Acid
CCEWCCNXPXAXCTXGC

SEQ ID NO: 4639 - protein, 17 aa, Artificial Sequence
  Synthetically generated peptide
  VARIANT (1)..(17): Xaa = Any Amino Acid
CCEWCCNXPXAXCTGXC

SEQ ID NO: 4640 - protein, 16 aa, Artificial Sequence
  Synthetically generated peptide
  VARIANT (1)..(16): Xaa = Any Amino Acid
CCEWCCNXPXACXTGC

SEQ ID NO: 4641 - protein, 17 aa, Artificial Sequence
  Synthetically generated peptide
  VARIANT (1)..(17): Xaa = Any Amino Acid
CCEWCCNXPXACXXTGC

SEQ ID NO: 4642 - protein, 17 aa, Artificial Sequence
  Synthetically generated peptide
  VARIANT (1)..(17): Xaa = Any Amino Acid
CCEWCCNXPXACXTXGC

SEQ ID NO: 4643 - protein, 17 aa, Artificial Sequence
  Synthetically generated peptide
  VARIANT (1)..(17): Xaa = Any Amino Acid
CCEWCCNXPXACXTGXC

SEQ ID NO: 4644 - protein, 16 aa, Artificial Sequence
  Synthetically generated peptide
  VARIANT (1)..(16): Xaa = Any Amino Acid
CCEWCCNXPXACTXGC

SEQ ID NO: 4645 - protein, 17 aa, Artificial Sequence
  Synthetically generated peptide
  VARIANT (1)..(17): Xaa = Any Amino Acid
CCEWCCNXPXACTXXGC

SEQ ID NO: 4646 - protein, 17 aa, Artificial Sequence
  Synthetically generated peptide
  VARIANT (1)..(17): Xaa = Any Amino Acid
CCEWCCNXPXACTXGXC

SEQ ID NO: 4647 - protein, 16 aa, Artificial Sequence
  Synthetically generated peptide
  VARIANT (1)..(16): Xaa = Any Amino Acid
CCEWCCNXPXACTGXC

SEQ ID NO: 4648 - protein, 17 aa, Artificial Sequence
  Synthetically generated peptide
  VARIANT (1)..(17): Xaa = Any Amino Acid
CCEWCCNXPXACTGXXC

SEQ ID NO: 4649 - protein, 15 aa, Artificial Sequence
  Synthetically generated peptide
  VARIANT (1)..(15): Xaa = Any Amino Acid
CCEWCCNXPAXCTGC

SEQ ID NO: 4650 - protein, 16 aa, Artificial Sequence
  Synthetically generated peptide
  VARIANT (1)..(16): Xaa = Any Amino Acid
CCEWCCNXPAXXCTGC

SEQ ID NO: 4651 - protein, 17 aa, Artificial Sequence
  Synthetically generated peptide
  VARIANT (1)..(17): Xaa = Any Amino Acid
CCEWCCNXPAXXXCTGC

SEQ ID NO: 4652 - protein, 17 aa, Artificial Sequence
  Synthetically generated peptide
  VARIANT (1)..(17): Xaa = Any Amino Acid
CCEWCCNXPAXXCXTGC

SEQ ID NO: 4653 - protein, 17 aa, Artificial Sequence
  Synthetically generated peptide
  VARIANT (1)..(17): Xaa = Any Amino Acid
CCEWCCNXPAXXCTXGC

SEQ ID NO: 4654 - protein, 17 aa, Artificial Sequence
  Synthetically generated peptide
  VARIANT (1)..(17): Xaa = Any Amino Acid
CCEWCCNXPAXXCTGXC

SEQ ID NO: 4655 - protein, 16 aa, Artificial Sequence
  Synthetically generated peptide
  VARIANT (1)..(16): Xaa = Any Amino Acid
CCEWCCNXPAXCXTGC

SEQ ID NO: 4656 - protein, 17 aa, Artificial Sequence
  Synthetically generated peptide
  VARIANT (1)..(17): Xaa = Any Amino Acid
CCEWCCNXPAXCXXTGC

SEQ ID NO: 4657 - protein, 17 aa, Artificial Sequence
  Synthetically generated peptide
  VARIANT (1)..(17): Xaa = Any Amino Acid
CCEWCCNXPAXCXTXGC

SEQ ID NO: 4658 - protein, 17 aa, Artificial Sequence
  Synthetically generated peptide
  VARIANT (1)..(17): Xaa = Any Amino Acid
CCEWCCNXPAXCXTGXC

SEQ ID NO: 4659 - protein, 16 aa, Artificial Sequence
  Synthetically generated peptide
  VARIANT (1)..(16): Xaa = Any Amino Acid
CCEWCCNXPAXCTXGC

SEQ ID NO: 4660 - protein, 17 aa, Artificial Sequence
  Synthetically generated peptide
  VARIANT (1)..(17): Xaa = Any Amino Acid
CCEWCCNXPAXCTXXGC

SEQ ID NO: 4661 - protein, 17 aa, Artificial Sequence
  Synthetically generated peptide
  VARIANT (1)..(17): Xaa = Any Amino Acid
CCEWCCNXPAXCTXGXC

SEQ ID NO: 4662 - protein, 16 aa, Artificial Sequence
  Synthetically generated peptide
  VARIANT (1)..(16): Xaa = Any Amino Acid
CCEWCCNXPAXCTGXC

SEQ ID NO: 4663 - protein, 17 aa, Artificial Sequence
  Synthetically generated peptide
  VARIANT (1)..(17): Xaa = Any Amino Acid
CCEWCCNXPAXCTGXXC

SEQ ID NO: 4664 - protein, 15 aa, Artificial Sequence
  Synthetically generated peptide
  VARIANT (1)..(15): Xaa = Any Amino Acid
CCEWCCNXPACXTGC

SEQ ID NO: 4665 - protein, 16 aa, Artificial Sequence
  Synthetically generated peptide
  VARIANT (1)..(16): Xaa = Any Amino Acid
CCEWCCNXPACXXTGC

SEQ ID NO: 4666 - protein, 17 aa, Artificial Sequence
  Synthetically generated peptide
  VARIANT (1)..(17): Xaa = Any Amino Acid
CCEWCCNXPACXXXTGC

SEQ ID NO: 4667 - protein, 17 aa, Artificial Sequence
  Synthetically generated peptide
  VARIANT (1)..(17): Xaa = Any Amino Acid
CCEWCCNXPACXXTXGC

SEQ ID NO: 4668 - protein, 17 aa, Artificial Sequence
  Synthetically generated peptide
  VARIANT (1)..(17): Xaa = Any Amino Acid
CCEWCCNXPACXXTGXC

SEQ ID NO: 4669 - protein, 16 aa, Artificial Sequence
  Synthetically generated peptide
  VARIANT (1)..(16): Xaa = Any Amino Acid
CCEWCCNXPACXTXGC

SEQ ID NO: 4670 - protein, 17 aa, Artificial Sequence
  Synthetically generated peptide
  VARIANT (1)..(17): Xaa = Any Amino Acid
CCEWCCNXPACXTXXGC

SEQ ID NO: 4671 - protein, 17 aa, Artificial Sequence
  Synthetically generated peptide
  VARIANT (1)..(17): Xaa = Any Amino Acid
CCEWCCNXPACXTXGXC

SEQ ID NO: 4672 - protein, 16 aa, Artificial Sequence
  Synthetically generated peptide
  VARIANT (1)..(16): Xaa = Any Amino Acid
CCEWCCNXPACXTGXC

SEQ ID NO: 4673 - protein, 17 aa, Artificial Sequence
  Synthetically generated peptide
  VARIANT (1)..(17): Xaa = Any Amino Acid
CCEWCCNXPACXTGXXC

SEQ ID NO: 4674 - protein, 15 aa, Artificial Sequence
  Synthetically generated peptide
  VARIANT (1)..(15): Xaa = Any Amino Acid
CCEWCCNXPACTXGC

SEQ ID NO: 4675 - protein, 16 aa, Artificial Sequence
  Synthetically generated peptide
  VARIANT (1)..(16): Xaa = Any Amino Acid
CCEWCCNXPACTXXGC

SEQ ID NO: 4676 - protein, 17 aa, Artificial Sequence
  Synthetically generated peptide
  VARIANT (1)..(17): Xaa = Any Amino Acid
CCEWCCNXPACTXXXGC

SEQ ID NO: 4677 - protein, 17 aa, Artificial Sequence
  Synthetically generated peptide
  VARIANT (1)..(17): Xaa = Any Amino Acid
CCEWCCNXPACTXXGXC

SEQ ID NO: 4678 - protein, 16 aa, Artificial Sequence
  Synthetically generated peptide
  VARIANT (1)..(16): Xaa = Any Amino Acid
CCEWCCNXPACTXGXC

SEQ ID NO: 4679 - protein, 17 aa, Artificial Sequence
  Synthetically generated peptide
  VARIANT (1)..(17): Xaa = Any Amino Acid
CCEWCCNXPACTXGXXC

SEQ ID NO: 4680 - protein, 15 aa, Artificial Sequence
  Synthetically generated peptide
  VARIANT (1)..(15): Xaa = Any Amino Acid
CCEWCCNXPACTGXC

SEQ ID NO: 4681 - protein, 16 aa, Artificial Sequence
  Synthetically generated peptide
  VARIANT (1)..(16): Xaa = Any Amino Acid
CCEWCCNXPACTGXXC

SEQ ID NO: 4682 - protein, 17 aa, Artificial Sequence
  Synthetically generated peptide
  VARIANT (1)..(17): Xaa = Any Amino Acid
CCEWCCNXPACTGXXXC

SEQ ID NO: 4683 - protein, 14 aa, Artificial Sequence
  Synthetically generated peptide
  VARIANT (1)..(14): Xaa = Any Amino Acid
CCEWCCNPXACTGC

SEQ ID NO: 4684 - protein, 15 aa, Artificial Sequence
  Synthetically generated peptide
  VARIANT (1)..(15): Xaa = Any Amino Acid
CCEWCCNPXXACTGC

SEQ ID NO: 4685 - protein, 16 aa, Artificial Sequence
  Synthetically generated peptide
  VARIANT (1)..(16): Xaa = Any Amino Acid
CCEWCCNPXXXACTGC

SEQ ID NO: 4686 - protein, 17 aa, Artificial Sequence
  Synthetically generated peptide
  VARIANT (1)..(17): Xaa = Any Amino Acid
CCEWCCNPXXXXACTGC

SEQ ID NO: 4687 - protein, 17 aa, Artificial Sequence
  Synthetically generated peptide
  VARIANT (1)..(17): Xaa = Any Amino Acid
CCEWCCNPXXXAXCTGC

SEQ ID NO: 4688 - protein, 17 aa, Artificial Sequence
  Synthetically generated peptide
  VARIANT (1)..(17): Xaa = Any Amino Acid
CCEWCCNPXXXACXTGC

SEQ ID NO: 4689 - protein, 17 aa, Artificial Sequence
  Synthetically generated peptide
  VARIANT (1)..(17): Xaa = Any Amino Acid
CCEWCCNPXXXACTXGC

SEQ ID NO: 4690 - protein, 17 aa, Artificial Sequence
  Synthetically generated peptide
  VARIANT (1)..(17): Xaa = Any Amino Acid
CCEWCCNPXXXACTGXC

SEQ ID NO: 4691 - protein, 16 aa, Artificial Sequence
  Synthetically generated peptide
  VARIANT (1)..(16): Xaa = Any Amino Acid
CCEWCCNPXXAXCTGC

SEQ ID NO: 4692 - protein, 17 aa, Artificial Sequence
  Synthetically generated peptide
  VARIANT (1)..(17): Xaa = Any Amino Acid
CCEWCCNPXXAXXCTGC

SEQ ID NO: 4693 - protein, 17 aa, Artificial Sequence
  Synthetically generated peptide
  VARIANT (1)..(17): Xaa = Any Amino Acid
CCEWCCNPXXAXCXTGC

SEQ ID NO: 4694 - protein, 17 aa, Artificial Sequence
  Synthetically generated peptide
  VARIANT (1)..(17): Xaa = Any Amino Acid
CCEWCCNPXXAXCTXGC

SEQ ID NO: 4695 - protein, 17 aa, Artificial Sequence
  Synthetically generated peptide
  VARIANT (1)..(17): Xaa = Any Amino Acid
CCEWCCNPXXAXCTGXC

SEQ ID NO: 4696 - protein, 16 aa, Artificial Sequence
  Synthetically generated peptide
  VARIANT (1)..(16): Xaa = Any Amino Acid
CCEWCCNPXXACXTGC

SEQ ID NO: 4697 - protein, 17 aa, Artificial Sequence
  Synthetically generated peptide
  VARIANT (1)..(17): Xaa = Any Amino Acid
CCEWCCNPXXACXXTGC

SEQ ID NO: 4698 - protein, 17 aa, Artificial Sequence
  Synthetically generated peptide
  VARIANT (1)..(17): Xaa = Any Amino Acid
CCEWCCNPXXACXTXGC

SEQ ID NO: 4699 - protein, 17 aa, Artificial Sequence
  Synthetically generated peptide
  VARIANT (1)..(17): Xaa = Any Amino Acid
CCEWCCNPXXACXTGXC

SEQ ID NO: 4700 - protein, 16 aa, Artificial Sequence
  Synthetically generated peptide
  VARIANT (1)..(16): Xaa = Any Amino Acid
CCEWCCNPXXACTXGC

SEQ ID NO: 4701 - protein, 17 aa, Artificial Sequence
  Synthetically generated peptide
  VARIANT (1)..(17): Xaa = Any Amino Acid
CCEWCCNPXXACTXXGC

SEQ ID NO: 4702 - protein, 17 aa, Artificial Sequence
  Synthetically generated peptide
  VARIANT (1)..(17): Xaa = Any Amino Acid
CCEWCCNPXXACTXGXC

SEQ ID NO: 4703 - protein, 16 aa, Artificial Sequence
  Synthetically generated peptide
  VARIANT (1)..(16): Xaa = Any Amino Acid
CCEWCCNPXXACTGXC

SEQ ID NO: 4704 - protein, 17 aa, Artificial Sequence
  Synthetically generated peptide
  VARIANT (1)..(17): Xaa = Any Amino Acid
CCEWCCNPXXACTGXXC

SEQ ID NO: 4705 - protein, 15 aa, Artificial Sequence
  Synthetically generated peptide
  VARIANT (1)..(15): Xaa = Any Amino Acid
CCEWCCNPXAXCTGC

SEQ ID NO: 4706 - protein, 16 aa, Artificial Sequence
  Synthetically generated peptide
  VARIANT (1)..(16): Xaa = Any Amino Acid
CCEWCCNPXAXXCTGC

SEQ ID NO: 4707 - protein, 17 aa, Artificial Sequence
  Synthetically generated peptide
  VARIANT (1)..(17): Xaa = Any Amino Acid
CCEWCCNPXAXXXCTGC

SEQ ID NO: 4708 - protein, 17 aa, Artificial Sequence
  Synthetically generated peptide
  VARIANT (1)..(17): Xaa = Any Amino Acid
CCEWCCNPXAXXCXTGC

SEQ ID NO: 4709 - protein, 17 aa, Artificial Sequence
  Synthetically generated peptide
  VARIANT (1)..(17): Xaa = Any Amino Acid
CCEWCCNPXAXXCTXGC

SEQ ID NO: 4710 - protein, 17 aa, Artificial Sequence
  Synthetically generated peptide
  VARIANT (1)..(17): Xaa = Any Amino Acid
CCEWCCNPXAXXCTGXC

SEQ ID NO: 4711 - protein, 16 aa, Artificial Sequence
  Synthetically generated peptide
  VARIANT (1)..(16): Xaa = Any Amino Acid
CCEWCCNPXAXCXTGC

SEQ ID NO: 4712 - protein, 17 aa, Artificial Sequence
  Synthetically generated peptide
  VARIANT (1)..(17): Xaa = Any Amino Acid
CCEWCCNPXAXCXXTGC

SEQ ID NO: 4713 - protein, 17 aa, Artificial Sequence
  Synthetically generated peptide
  VARIANT (1)..(17): Xaa = Any Amino Acid
CCEWCCNPXAXCXTXGC

SEQ ID NO: 4714 - protein, 17 aa, Artificial Sequence
  Synthetically generated peptide
  VARIANT (1)..(17): Xaa = Any Amino Acid
CCEWCCNPXAXCXTGXC

SEQ ID NO: 4715 - protein, 16 aa, Artificial Sequence
  Synthetically generated peptide
  VARIANT (1)..(16): Xaa = Any Amino Acid
CCEWCCNPXAXCTXGC

SEQ ID NO: 4716 - protein, 17 aa, Artificial Sequence
  Synthetically generated peptide
  VARIANT (1)..(17): Xaa = Any Amino Acid
CCEWCCNPXAXCTXXGC

SEQ ID NO: 4717 - protein, 17 aa, Artificial Sequence
  Synthetically generated peptide
  VARIANT (1)..(17): Xaa = Any Amino Acid
CCEWCCNPXAXCTXGXC

SEQ ID NO: 4718 - protein, 16 aa, Artificial Sequence
  Synthetically generated peptide
  VARIANT (1)..(16): Xaa = Any Amino Acid
CCEWCCNPXAXCTGXC

SEQ ID NO: 4719 - protein, 17 aa, Artificial Sequence
  Synthetically generated peptide
  VARIANT (1)..(17): Xaa = Any Amino Acid
CCEWCCNPXAXCTGXXC

SEQ ID NO: 4720 - protein, 15 aa, Artificial Sequence
  Synthetically generated peptide
  VARIANT (1)..(15): Xaa = Any Amino Acid
CCEWCCNPXACXTGC

SEQ ID NO: 4721 - protein, 16 aa, Artificial Sequence
  Synthetically generated peptide
  VARIANT (1)..(16): Xaa = Any Amino Acid
CCEWCCNPXACXXTGC

SEQ ID NO: 4722 - protein, 17 aa, Artificial Sequence
  Synthetically generated peptide
  VARIANT (1)..(17): Xaa = Any Amino Acid
CCEWCCNPXACXXXTGC

SEQ ID NO: 4723 - protein, 17 aa, Artificial Sequence
  Synthetically generated peptide
  VARIANT (1)..(17): Xaa = Any Amino Acid
CCEWCCNPXACXXTXGC

SEQ ID NO: 4724 - protein, 17 aa, Artificial Sequence
  Synthetically generated peptide
  VARIANT (1)..(17): Xaa = Any Amino Acid
CCEWCCNPXACXXTGXC

SEQ ID NO: 4725 - protein, 16 aa, Artificial Sequence
  Synthetically generated peptide
  VARIANT (1)..(16): Xaa = Any Amino Acid
CCEWCCNPXACXTXGC

SEQ ID NO: 4726 - protein, 17 aa, Artificial Sequence
  Synthetically generated peptide
  VARIANT (1)..(17): Xaa = Any Amino Acid
CCEWCCNPXACXTXXGC

SEQ ID NO: 4727 - protein, 17 aa, Artificial Sequence
  Synthetically generated peptide
  VARIANT (1)..(17): Xaa = Any Amino Acid
CCEWCCNPXACXTXGXC

SEQ ID NO: 4728 - protein, 16 aa, Artificial Sequence
  Synthetically generated peptide
  VARIANT (1)..(16): Xaa = Any Amino Acid
CCEWCCNPXACXTGXC

SEQ ID NO: 4729 - protein, 17 aa, Artificial Sequence
  Synthetically generated peptide
  VARIANT (1)..(17): Xaa = Any Amino Acid
CCEWCCNPXACXTGXXC

SEQ ID NO: 4730 - protein, 15 aa, Artificial Sequence
  Synthetically generated peptide
  VARIANT (1)..(15): Xaa = Any Amino Acid
CCEWCCNPXACTXGC

SEQ ID NO: 4731 - protein, 16 aa, Artificial Sequence
  Synthetically generated peptide
  VARIANT (1)..(16): Xaa = Any Amino Acid
CCEWCCNPXACTXXGC

SEQ ID NO: 4732 - protein, 17 aa, Artificial Sequence
  Synthetically generated peptide
  VARIANT (1)..(17): Xaa = Any Amino Acid
CCEWCCNPXACTXXXGC

SEQ ID NO: 4733 - protein, 17 aa, Artificial Sequence
  Synthetically generated peptide
  VARIANT (1)..(17): Xaa = Any Amino Acid
CCEWCCNPXACTXXGXC

SEQ ID NO: 4734 - protein, 16 aa, Artificial Sequence
  Synthetically generated peptide
  VARIANT (1)..(16): Xaa = Any Amino Acid
CCEWCCNPXACTXGXC

SEQ ID NO: 4735 - protein, 17 aa, Artificial Sequence
  Synthetically generated peptide
  VARIANT (1)..(17): Xaa = Any Amino Acid
CCEWCCNPXACTXGXXC

SEQ ID NO: 4736 - protein, 15 aa, Artificial Sequence
  Synthetically generated peptide
  VARIANT (1)..(15): Xaa = Any Amino Acid
CCEWCCNPXACTGXC

SEQ ID NO: 4737 - protein, 16 aa, Artificial Sequence
  Synthetically generated peptide
  VARIANT (1)..(16): Xaa = Any Amino Acid
CCEWCCNPXACTGXXC

SEQ ID NO: 4738 - protein, 17 aa, Artificial Sequence
  Synthetically generated peptide
  VARIANT (1)..(17): Xaa = Any Amino Acid
CCEWCCNPXACTGXXXC

SEQ ID NO: 4739 - protein, 14 aa, Artificial Sequence
  Synthetically generated peptide
  VARIANT (1)..(14): Xaa = Any Amino Acid
CCEWCCNPAXCTGC

SEQ ID NO: 4740 - protein, 15 aa, Artificial Sequence
  Synthetically generated peptide
  VARIANT (1)..(15): Xaa = Any Amino Acid
CCEWCCNPAXXCTGC

SEQ ID NO: 4741 - protein, 16 aa, Artificial Sequence
  Synthetically generated peptide
  VARIANT (1)..(16): Xaa = Any Amino Acid
CCEWCCNPAXXXCTGC

SEQ ID NO: 4742 - protein, 17 aa, Artificial Sequence
  Synthetically generated peptide
  VARIANT (1)..(17): Xaa = Any Amino Acid
CCEWCCNPAXXXXCTGC

SEQ ID NO: 4743 - protein, 17 aa, Artificial Sequence
  Synthetically generated peptide
  VARIANT (1)..(17): Xaa = Any Amino Acid
CCEWCCNPAXXXCXTGC

SEQ ID NO: 4744 - protein, 17 aa, Artificial Sequence
  Synthetically generated peptide
  VARIANT (1)..(17): Xaa = Any Amino Acid
CCEWCCNPAXXXCTXGC

SEQ ID NO: 4745 - protein, 17 aa, Artificial Sequence
  Synthetically generated peptide
  VARIANT (1)..(17): Xaa = Any Amino Acid
CCEWCCNPAXXXCTGXC

SEQ ID NO: 4746 - protein, 16 aa, Artificial Sequence
  Synthetically generated peptide
  VARIANT (1)..(16): Xaa = Any Amino Acid
CCEWCCNPAXXCXTGC

SEQ ID NO: 4747 - protein, 17 aa, Artificial Sequence
  Synthetically generated peptide
  VARIANT (1)..(17): Xaa = Any Amino Acid
CCEWCCNPAXXCXXTGC

SEQ ID NO: 4748 - protein, 17 aa, Artificial Sequence
  Synthetically generated peptide
  VARIANT (1)..(17): Xaa = Any Amino Acid
CCEWCCNPAXXCXTXGC

SEQ ID NO: 4749 - protein, 17 aa, Artificial Sequence
  Synthetically generated peptide
  VARIANT (1)..(17): Xaa = Any Amino Acid
CCEWCCNPAXXCXTGXC

SEQ ID NO: 4750 - protein, 16 aa, Artificial Sequence
  Synthetically generated peptide
  VARIANT (1)..(16): Xaa = Any Amino Acid
CCEWCCNPAXXCTXGC

SEQ ID NO: 4751 - protein, 17 aa, Artificial Sequence
  Synthetically generated peptide
  VARIANT (1)..(17): Xaa = Any Amino Acid
CCEWCCNPAXXCTXXGC

SEQ ID NO: 4752 - protein, 17 aa, Artificial Sequence
  Synthetically generated peptide
  VARIANT (1)..(17): Xaa = Any Amino Acid
CCEWCCNPAXXCTXGXC

SEQ ID NO: 4753 - protein, 16 aa, Artificial Sequence
  Synthetically generated peptide
  VARIANT (1)..(16): Xaa = Any Amino Acid
CCEWCCNPAXXCTGXC

SEQ ID NO: 4754 - protein, 17 aa, Artificial Sequence
  Synthetically generated peptide
  VARIANT (1)..(17): Xaa = Any Amino Acid
CCEWCCNPAXXCTGXXC

SEQ ID NO: 4755 - protein, 15 aa, Artificial Sequence
  Synthetically generated peptide
  VARIANT (1)..(15): Xaa = Any Amino Acid
CCEWCCNPAXCXTGC

SEQ ID NO: 4756 - protein, 16 aa, Artificial Sequence
  Synthetically generated peptide
  VARIANT (1)..(16): Xaa = Any Amino Acid
CCEWCCNPAXCXXTGC

SEQ ID NO: 4757 - protein, 17 aa, Artificial Sequence
  Synthetically generated peptide
  VARIANT (1)..(17): Xaa = Any Amino Acid
CCEWCCNPAXCXXXTGC

SEQ ID NO: 4758 - protein, 17 aa, Artificial Sequence
  Synthetically generated peptide
  VARIANT (1)..(17): Xaa = Any Amino Acid
CCEWCCNPAXCXXTXGC

SEQ ID NO: 4759 - protein, 17 aa, Artificial Sequence
  Synthetically generated peptide
  VARIANT (1)..(17): Xaa = Any Amino Acid
CCEWCCNPAXCXXTGXC

SEQ ID NO: 4760 - protein, 16 aa, Artificial Sequence
  Synthetically generated peptide
  VARIANT (1)..(16): Xaa = Any Amino Acid
CCEWCCNPAXCXTXGC

SEQ ID NO: 4761 - protein, 17 aa, Artificial Sequence
  Synthetically generated peptide
  VARIANT (1)..(17): Xaa = Any Amino Acid
CCEWCCNPAXCXTXXGC

SEQ ID NO: 4762 - protein, 17 aa, Artificial Sequence
  Synthetically generated peptide
  VARIANT (1)..(17): Xaa = Any Amino Acid
CCEWCCNPAXCXTXGXC

SEQ ID NO: 4763 - protein, 16 aa, Artificial Sequence
  Synthetically generated peptide
  VARIANT (1)..(16): Xaa = Any Amino Acid
CCEWCCNPAXCXTGXC

SEQ ID NO: 4764 - protein, 17 aa, Artificial Sequence
  Synthetically generated peptide
  VARIANT (1)..(17): Xaa = Any Amino Acid
CCEWCCNPAXCXTGXXC

SEQ ID NO: 4765 - protein, 15 aa, Artificial Sequence
  Synthetically generated peptide
  VARIANT (1)..(15): Xaa = Any Amino Acid
CCEWCCNPAXCTXGC

SEQ ID NO: 4766 - protein, 16 aa, Artificial Sequence
  Synthetically generated peptide
  VARIANT (1)..(16): Xaa = Any Amino Acid
CCEWCCNPAXCTXXGC

SEQ ID NO: 4767 - protein, 17 aa, Artificial Sequence
  Synthetically generated peptide
  VARIANT (1)..(17): Xaa = Any Amino Acid
CCEWCCNPAXCTXXXGC

SEQ ID NO: 4768 - protein, 17 aa, Artificial Sequence
  Synthetically generated peptide
  VARIANT (1)..(17): Xaa = Any Amino Acid
CCEWCCNPAXCTXXGXC

SEQ ID NO: 4769 - protein, 16 aa, Artificial Sequence
  Synthetically generated peptide
  VARIANT (1)..(16): Xaa = Any Amino Acid
CCEWCCNPAXCTXGXC

SEQ ID NO: 4770 - protein, 17 aa, Artificial Sequence
  Synthetically generated peptide
  VARIANT (1)..(17): Xaa = Any Amino Acid
CCEWCCNPAXCTXGXXC

SEQ ID NO: 4771 - protein, 15 aa, Artificial Sequence
  Synthetically generated peptide
  VARIANT (1)..(15): Xaa = Any Amino Acid
CCEWCCNPAXCTGXC

SEQ ID NO: 4772 - protein, 16 aa, Artificial Sequence
  Synthetically generated peptide
  VARIANT (1)..(16): Xaa = Any Amino Acid
CCEWCCNPAXCTGXXC

SEQ ID NO: 4773 - protein, 17 aa, Artificial Sequence
  Synthetically generated peptide
  VARIANT (1)..(17): Xaa = Any Amino Acid
CCEWCCNPAXCTGXXXC

SEQ ID NO: 4774 - protein, 14 aa, Artificial Sequence
  Synthetically generated peptide
  VARIANT (1)..(14): Xaa = Any Amino Acid
CCEWCCNPACXTGC

SEQ ID NO: 4775 - protein, 15 aa, Artificial Sequence
  Synthetically generated peptide
  VARIANT (1)..(15): Xaa = Any Amino Acid
CCEWCCNPACXXTGC

SEQ ID NO: 4776 - protein, 16 aa, Artificial Sequence
  Synthetically generated peptide
  VARIANT (1)..(16): Xaa = Any Amino Acid
CCEWCCNPACXXXTGC

SEQ ID NO: 4777 - protein, 17 aa, Artificial Sequence
  Synthetically generated peptide
  VARIANT (1)..(17): Xaa = Any Amino Acid
CCEWCCNPACXXXXTGC

SEQ ID NO: 4778 - protein, 17 aa, Artificial Sequence
  Synthetically generated peptide
  VARIANT (1)..(17): Xaa = Any Amino Acid
CCEWCCNPACXXXTXGC

SEQ ID NO: 4779 - protein, 17 aa, Artificial Sequence
  Synthetically generated peptide
  VARIANT (1)..(17): Xaa = Any Amino Acid
CCEWCCNPACXXXTGXC

SEQ ID NO: 4780 - protein, 16 aa, Artificial Sequence
  Synthetically generated peptide
  VARIANT (1)..(16): Xaa = Any Amino Acid
CCEWCCNPACXXTXGC

SEQ ID NO: 4781 - protein, 17 aa, Artificial Sequence
  Synthetically generated peptide
  VARIANT (1)..(17): Xaa = Any Amino Acid
CCEWCCNPACXXTXXGC

SEQ ID NO: 4782 - protein, 17 aa, Artificial Sequence
  Synthetically generated peptide
  VARIANT (1)..(17): Xaa = Any Amino Acid
CCEWCCNPACXXTXGXC

SEQ ID NO: 4783 - protein, 16 aa, Artificial Sequence
  Synthetically generated peptide
  VARIANT (1)..(16): Xaa = Any Amino Acid
CCEWCCNPACXXTGXC

SEQ ID NO: 4784 - protein, 17 aa, Artificial Sequence
  Synthetically generated peptide
  VARIANT (1)..(17): Xaa = Any Amino Acid
CCEWCCNPACXXTGXXC

SEQ ID NO: 4785 - protein, 15 aa, Artificial Sequence
  Synthetically generated peptide
  VARIANT (1)..(15): Xaa = Any Amino Acid
CCEWCCNPACXTXGC

SEQ ID NO: 4786 - protein, 16 aa, Artificial Sequence
  Synthetically generated peptide
  VARIANT (1)..(16): Xaa = Any Amino Acid
CCEWCCNPACXTXXGC

SEQ ID NO: 4787 - protein, 17 aa, Artificial Sequence
  Synthetically generated peptide
  VARIANT (1)..(17): Xaa = Any Amino Acid
CCEWCCNPACXTXXXGC

SEQ ID NO: 4788 - protein, 17 aa, Artificial Sequence
  Synthetically generated peptide
  VARIANT (1)..(17): Xaa = Any Amino Acid
CCEWCCNPACXTXXGXC

SEQ ID NO: 4789 - protein, 16 aa, Artificial Sequence
  Synthetically generated peptide
  VARIANT (1)..(16): Xaa = Any Amino Acid
CCEWCCNPACXTXGXC

SEQ ID NO: 4790 - protein, 17 aa, Artificial Sequence
  Synthetically generated peptide
  VARIANT (1)..(17): Xaa = Any Amino Acid
CCEWCCNPACXTXGXXC

SEQ ID NO: 4791 - protein, 15 aa, Artificial Sequence
  Synthetically generated peptide
  VARIANT (1)..(15): Xaa = Any Amino Acid
CCEWCCNPACXTGXC

SEQ ID NO: 4792 - protein, 16 aa, Artificial Sequence
  Synthetically generated peptide
  VARIANT (1)..(16): Xaa = Any Amino Acid
CCEWCCNPACXTGXXC

SEQ ID NO: 4793 - protein, 17 aa, Artificial Sequence
  Synthetically generated peptide
  VARIANT (1)..(17): Xaa = Any Amino Acid
CCEWCCNPACXTGXXXC

SEQ ID NO: 4794 - protein, 14 aa, Artificial Sequence
  Synthetically generated peptide
  VARIANT (1)..(14): Xaa = Any Amino Acid
CCEWCCNPACTXGC

SEQ ID NO: 4795 - protein, 15 aa, Artificial Sequence
  Synthetically generated peptide
  VARIANT (1)..(15): Xaa = Any Amino Acid
CCEWCCNPACTXXGC

SEQ ID NO: 4796 - protein, 16 aa, Artificial Sequence
  Synthetically generated peptide
  VARIANT (1)..(16): Xaa = Any Amino Acid
CCEWCCNPACTXXXGC

SEQ ID NO: 4797 - protein, 17 aa, Artificial Sequence
  Synthetically generated peptide
  VARIANT (1)..(17): Xaa = Any Amino Acid
CCEWCCNPACTXXXXGC

SEQ ID NO: 4798 - protein, 17 aa, Artificial Sequence
  Synthetically generated peptide
  VARIANT (1)..(17): Xaa = Any Amino Acid
CCEWCCNPACTXXXGXC

SEQ ID NO: 4799 - protein, 16 aa, Artificial Sequence
  Synthetically generated peptide
  VARIANT (1)..(16): Xaa = Any Amino Acid
CCEWCCNPACTXXGXC

SEQ ID NO: 4800 - protein, 17 aa, Artificial Sequence
  Synthetically generated peptide
  VARIANT (1)..(17): Xaa = Any Amino Acid
CCEWCCNPACTXXGXXC

SEQ ID NO: 4801 - protein, 15 aa, Artificial Sequence
  Synthetically generated peptide
  VARIANT (1)..(15): Xaa = Any Amino Acid
CCEWCCNPACTXGXC

SEQ ID NO: 4802 - protein, 16 aa, Artificial Sequence
  Synthetically generated peptide
  VARIANT (1)..(16): Xaa = Any Amino Acid
CCEWCCNPACTXGXXC

SEQ ID NO: 4803 - protein, 17 aa, Artificial Sequence
  Synthetically generated peptide
  VARIANT (1)..(17): Xaa = Any Amino Acid
CCEWCCNPACTXGXXXC

SEQ ID NO: 4804 - protein, 14 aa, Artificial Sequence
  Synthetically generated peptide
  VARIANT (1)..(14): Xaa = Any Amino Acid
CCEWCCNPACTGXC

SEQ ID NO: 4805 - protein, 15 aa, Artificial Sequence
  Synthetically generated peptide
  VARIANT (1)..(15): Xaa = Any Amino Acid
CCEWCCNPACTGXXC

SEQ ID NO: 4806 - protein, 16 aa, Artificial Sequence
  Synthetically generated peptide
  VARIANT (1)..(16): Xaa = Any Amino Acid
CCEWCCNPACTGXXXC

SEQ ID NO: 4807 - protein, 17 aa, Artificial Sequence
  Synthetically generated peptide
  VARIANT (1)..(17): Xaa = Any Amino Acid
CCEWCCNPACTGXXXXC

SEQ ID NO: 4808 - protein, 14 aa, Artificial Sequence
  Synthetically generated peptide
  VARIANT (1)..(14): Xaa = Any Amino Acid
CCXEFCCNPACTGC

SEQ ID NO: 4809 - protein, 15 aa, Artificial Sequence
  Synthetically generated peptide
  VARIANT (1)..(15): Xaa = Any Amino Acid
CCXXEFCCNPACTGC

SEQ ID NO: 4810 - protein, 16 aa, Artificial Sequence
  Synthetically generated peptide
  VARIANT (1)..(16): Xaa = Any Amino Acid
CCXXXEFCCNPACTGC

SEQ ID NO: 4811 - protein, 17 aa, Artificial Sequence
  Synthetically generated peptide
  VARIANT (1)..(17): Xaa = Any Amino Acid
CCXXXXEFCCNPACTGC

SEQ ID NO: 4812 - protein, 17 aa, Artificial Sequence
  Synthetically generated peptide
  VARIANT (1)..(17): Xaa = Any Amino Acid
CCXXXEXFCCNPACTGC

SEQ ID NO: 4813 - protein, 17 aa, Artificial Sequence
  Synthetically generated peptide
  VARIANT (1)..(17): Xaa = Any Amino Acid
CCXXXEFXCCNPACTGC

SEQ ID NO: 4814 - protein, 17 aa, Artificial Sequence
  Synthetically generated peptide
  VARIANT (1)..(17): Xaa = Any Amino Acid
CCXXXEFCCXNPACTGC

SEQ ID NO: 4815 - protein, 17 aa, Artificial Sequence
  Synthetically generated peptide
  VARIANT (1)..(17): Xaa = Any Amino Acid
CCXXXEFCCNXPACTGC

SEQ ID NO: 4816 - protein, 17 aa, Artificial Sequence
  Synthetically generated peptide
  VARIANT (1)..(17): Xaa = Any Amino Acid
CCXXXEFCCNPXACTGC

SEQ ID NO: 4817 - protein, 17 aa, Artificial Sequence
  Synthetically generated peptide
  VARIANT (1)..(17): Xaa = Any Amino Acid
CCXXXEFCCNPAXCTGC

SEQ ID NO: 4818 - protein, 17 aa, Artificial Sequence
  Synthetically generated peptide
  VARIANT (1)..(17): Xaa = Any Amino Acid
CCXXXEFCCNPACXTGC

SEQ ID NO: 4819 - protein, 17 aa, Artificial Sequence
  Synthetically generated peptide
  VARIANT (1)..(17): Xaa = Any Amino Acid
CCXXXEFCCNPACTXGC

SEQ ID NO: 4820 - protein, 17 aa, Artificial Sequence
  Synthetically generated peptide
  VARIANT (1)..(17): Xaa = Any Amino Acid
CCXXXEFCCNPACTGXC

SEQ ID NO: 4821 - protein, 16 aa, Artificial Sequence
  Synthetically generated peptide
  VARIANT (1)..(16): Xaa = Any Amino Acid
CCXXEXFCCNPACTGC

SEQ ID NO: 4822 - protein, 17 aa, Artificial Sequence
  Synthetically generated peptide
  VARIANT (1)..(17): Xaa = Any Amino Acid
CCXXEXXFCCNPACTGC

SEQ ID NO: 4823 - protein, 17 aa, Artificial Sequence
  Synthetically generated peptide
  VARIANT (1)..(17): Xaa = Any Amino Acid
CCXXEXFXCCNPACTGC

SEQ ID NO: 4824 - protein, 17 aa, Artificial Sequence
  Synthetically generated peptide
  VARIANT (1)..(17): Xaa = Any Amino Acid
CCXXEXFCCXNPACTGC

SEQ ID NO: 4825 - protein, 17 aa, Artificial Sequence
  Synthetically generated peptide
  VARIANT (1)..(17): Xaa = Any Amino Acid
CCXXEXFCCNXPACTGC

SEQ ID NO: 4826 - protein, 17 aa, Artificial Sequence
  Synthetically generated peptide
  VARIANT (1)..(17): Xaa = Any Amino Acid
CCXXEXFCCNPXACTGC

SEQ ID NO: 4827 - protein, 17 aa, Artificial Sequence
  Synthetically generated peptide
  VARIANT (1)..(17): Xaa = Any Amino Acid
CCXXEXFCCNPAXCTGC

SEQ ID NO: 4828 - protein, 17 aa, Artificial Sequence
  Synthetically generated peptide
  VARIANT (1)..(17): Xaa = Any Amino Acid
CCXXEXFCCNPACXTGC

SEQ ID NO: 4829 - protein, 17 aa, Artificial Sequence
  Synthetically generated peptide
  VARIANT (1)..(17): Xaa = Any Amino Acid
CCXXEXFCCNPACTXGC

SEQ ID NO: 4830 - protein, 17 aa, Artificial Sequence
  Synthetically generated peptide
  VARIANT (1)..(17): Xaa = Any Amino Acid
CCXXEXFCCNPACTGXC

SEQ ID NO: 4831 - protein, 16 aa, Artificial Sequence
  Synthetically generated peptide
  VARIANT (1)..(16): Xaa = Any Amino Acid
CCXXEFXCCNPACTGC

SEQ ID NO: 4832 - protein, 17 aa, Artificial Sequence
  Synthetically generated peptide
  VARIANT (1)..(17): Xaa = Any Amino Acid
CCXXEFXXCCNPACTGC

SEQ ID NO: 4833 - protein, 17 aa, Artificial Sequence
  Synthetically generated peptide
  VARIANT (1)..(17): Xaa = Any Amino Acid
CCXXEFXCCXNPACTGC

SEQ ID NO: 4834 - protein, 17 aa, Artificial Sequence
  Synthetically generated peptide
  VARIANT (1)..(17): Xaa = Any Amino Acid
CCXXEFXCCNXPACTGC

SEQ ID NO: 4835 - protein, 17 aa, Artificial Sequence
  Synthetically generated peptide
  VARIANT (1)..(17): Xaa = Any Amino Acid
CCXXEFXCCNPXACTGC

SEQ ID NO: 4836 - protein, 17 aa, Artificial Sequence
  Synthetically generated peptide
  VARIANT (1)..(17): Xaa = Any Amino Acid
CCXXEFXCCNPAXCTGC

SEQ ID NO: 4837 - protein, 17 aa, Artificial Sequence
  Synthetically generated peptide
  VARIANT (1)..(17): Xaa = Any Amino Acid
CCXXEFXCCNPACXTGC

SEQ ID NO: 4838 - protein, 17 aa, Artificial Sequence
  Synthetically generated peptide
  VARIANT (1)..(17): Xaa = Any Amino Acid
CCXXEFXCCNPACTXGC

SEQ ID NO: 4839 - protein, 17 aa, Artificial Sequence
  Synthetically generated peptide
  VARIANT (1)..(17): Xaa = Any Amino Acid
CCXXEFXCCNPACTGXC

SEQ ID NO: 4840 - protein, 16 aa, Artificial Sequence
  Synthetically generated peptide
  VARIANT (1)..(16): Xaa = Any Amino Acid
CCXXEFCCXNPACTGC

SEQ ID NO: 4841 - protein, 17 aa, Artificial Sequence
  Synthetically generated peptide
  VARIANT (1)..(17): Xaa = Any Amino Acid
CCXXEFCCXXNPACTGC

SEQ ID NO: 4842 - protein, 17 aa, Artificial Sequence
  Synthetically generated peptide
  VARIANT (1)..(17): Xaa = Any Amino Acid
CCXXEFCCXNXPACTGC

SEQ ID NO: 4843 - protein, 17 aa, Artificial Sequence
  Synthetically generated peptide
  VARIANT (1)..(17): Xaa = Any Amino Acid
CCXXEFCCXNPXACTGC

SEQ ID NO: 4844 - protein, 17 aa, Artificial Sequence
  Synthetically generated peptide
  VARIANT (1)..(17): Xaa = Any Amino Acid
CCXXEFCCXNPAXCTGC

SEQ ID NO: 4845 - protein, 17 aa, Artificial Sequence
  Synthetically generated peptide
  VARIANT (1)..(17): Xaa = Any Amino Acid
CCXXEFCCXNPACXTGC

SEQ ID NO: 4846 - protein, 17 aa, Artificial Sequence
  Synthetically generated peptide
  VARIANT (1)..(17): Xaa = Any Amino Acid
CCXXEFCCXNPACTXGC

SEQ ID NO: 4847 - protein, 17 aa, Artificial Sequence
  Synthetically generated peptide
  VARIANT (1)..(17): Xaa = Any Amino Acid
CCXXEFCCXNPACTGXC

SEQ ID NO: 4848 - protein, 16 aa, Artificial Sequence
  Synthetically generated peptide
  VARIANT (1)..(16): Xaa = Any Amino Acid
CCXXEFCCNXPACTGC

SEQ ID NO: 4849 - protein, 17 aa, Artificial Sequence
  Synthetically generated peptide
  VARIANT (1)..(17): Xaa = Any Amino Acid
CCXXEFCCNXXPACTGC

SEQ ID NO: 4850 - protein, 17 aa, Artificial Sequence
  Synthetically generated peptide
  VARIANT (1)..(17): Xaa = Any Amino Acid
CCXXEFCCNXPXACTGC

SEQ ID NO: 4851 - protein, 17 aa, Artificial Sequence
  Synthetically generated peptide
  VARIANT (1)..(17): Xaa = Any Amino Acid
CCXXEFCCNXPAXCTGC

SEQ ID NO: 4852 - protein, 17 aa, Artificial Sequence
  Synthetically generated peptide
  VARIANT (1)..(17): Xaa = Any Amino Acid
CCXXEFCCNXPACXTGC

SEQ ID NO: 4853 - protein, 17 aa, Artificial Sequence
  Synthetically generated peptide
  VARIANT (1)..(17): Xaa = Any Amino Acid
CCXXEFCCNXPACTXGC

SEQ ID NO: 4854 - protein, 17 aa, Artificial Sequence
  Synthetically generated peptide
  VARIANT (1)..(17): Xaa = Any Amino Acid
CCXXEFCCNXPACTGXC

SEQ ID NO: 4855 - protein, 16 aa, Artificial Sequence
  Synthetically generated peptide
  VARIANT (1)..(16): Xaa = Any Amino Acid
CCXXEFCCNPXACTGC

SEQ ID NO: 4856 - protein, 17 aa, Artificial Sequence
  Synthetically generated peptide
  VARIANT (1)..(17): Xaa = Any Amino Acid
CCXXEFCCNPXXACTGC

SEQ ID NO: 4857 - protein, 17 aa, Artificial Sequence
  Synthetically generated peptide
  VARIANT (1)..(17): Xaa = Any Amino Acid
CCXXEFCCNPXAXCTGC

SEQ ID NO: 4858 - protein, 17 aa, Artificial Sequence
  Synthetically generated peptide
  VARIANT (1)..(17): Xaa = Any Amino Acid
CCXXEFCCNPXACXTGC

SEQ ID NO: 4859 - protein, 17 aa, Artificial Sequence
  Synthetically generated peptide
  VARIANT (1)..(17): Xaa = Any Amino Acid
CCXXEFCCNPXACTXGC

SEQ ID NO: 4860 - protein, 17 aa, Artificial Sequence
  Synthetically generated peptide
  VARIANT (1)..(17): Xaa = Any Amino Acid
CCXXEFCCNPXACTGXC

SEQ ID NO: 4861 - protein, 16 aa, Artificial Sequence
  Synthetically generated peptide
  VARIANT (1)..(16): Xaa = Any Amino Acid
CCXXEFCCNPAXCTGC

SEQ ID NO: 4862 - protein, 17 aa, Artificial Sequence
  Synthetically generated peptide
  VARIANT (1)..(17): Xaa = Any Amino Acid
CCXXEFCCNPAXXCTGC

SEQ ID NO: 4863 - protein, 17 aa, Artificial Sequence
  Synthetically generated peptide
  VARIANT (1)..(17): Xaa = Any Amino Acid
CCXXEFCCNPAXCXTGC

SEQ ID NO: 4864 - protein, 17 aa, Artificial Sequence
  Synthetically generated peptide
  VARIANT (1)..(17): Xaa = Any Amino Acid
CCXXEFCCNPAXCTXGC

SEQ ID NO: 4865 - protein, 17 aa, Artificial Sequence
  Synthetically generated peptide
  VARIANT (1)..(17): Xaa = Any Amino Acid
CCXXEFCCNPAXCTGXC

SEQ ID NO: 4866 - protein, 16 aa, Artificial Sequence
  Synthetically generated peptide
  VARIANT (1)..(16): Xaa = Any Amino Acid
CCXXEFCCNPACXTGC

SEQ ID NO: 4867 - protein, 17 aa, Artificial Sequence
  Synthetically generated peptide
  VARIANT (1)..(17): Xaa = Any Amino Acid
CCXXEFCCNPACXXTGC

SEQ ID NO: 4868 - protein, 17 aa, Artificial Sequence
  Synthetically generated peptide
  VARIANT (1)..(17): Xaa = Any Amino Acid
CCXXEFCCNPACXTXGC

SEQ ID NO: 4869 - protein, 17 aa, Artificial Sequence
  Synthetically generated peptide
  VARIANT (1)..(17): Xaa = Any Amino Acid
CCXXEFCCNPACXTGXC

SEQ ID NO: 4870 - protein, 16 aa, Artificial Sequence
  Synthetically generated peptide
  VARIANT (1)..(16): Xaa = Any Amino Acid
CCXXEFCCNPACTXGC

SEQ ID NO: 4871 - protein, 17 aa, Artificial Sequence
  Synthetically generated peptide
  VARIANT (1)..(17): Xaa = Any Amino Acid
CCXXEFCCNPACTXXGC

SEQ ID NO: 4872 - protein, 17 aa, Artificial Sequence
  Synthetically generated peptide
  VARIANT (1)..(17): Xaa = Any Amino Acid
CCXXEFCCNPACTXGXC

SEQ ID NO: 4873 - protein, 16 aa, Artificial Sequence
  Synthetically generated peptide
  VARIANT (1)..(16): Xaa = Any Amino Acid
CCXXEFCCNPACTGXC

SEQ ID NO: 4874 - protein, 17 aa, Artificial Sequence
  Synthetically generated peptide
  VARIANT (1)..(17): Xaa = Any Amino Acid
CCXXEFCCNPACTGXXC

SEQ ID NO: 4875 - protein, 15 aa, Artificial Sequence
  Synthetically generated peptide
  VARIANT (1)..(15): Xaa = Any Amino Acid
CCXEXFCCNPACTGC

SEQ ID NO: 4876 - protein, 16 aa, Artificial Sequence
  Synthetically generated peptide
  VARIANT (1)..(16): Xaa = Any Amino Acid
CCXEXXFCCNPACTGC

SEQ ID NO: 4877 - protein, 17 aa, Artificial Sequence
  Synthetically generated peptide
  VARIANT (1)..(17): Xaa = Any Amino Acid
CCXEXXXFCCNPACTGC

SEQ ID NO: 4878 - protein, 17 aa, Artificial Sequence
  Synthetically generated peptide
  VARIANT (1)..(17): Xaa = Any Amino Acid
CCXEXXFXCCNPACTGC

SEQ ID NO: 4879 - protein, 17 aa, Artificial Sequence
  Synthetically generated peptide
  VARIANT (1)..(17): Xaa = Any Amino Acid
CCXEXXFCCXNPACTGC

SEQ ID NO: 4880 - protein, 17 aa, Artificial Sequence
  Synthetically generated peptide
  VARIANT (1)..(17): Xaa = Any Amino Acid
CCXEXXFCCNXPACTGC

SEQ ID NO: 4881 - protein, 17 aa, Artificial Sequence
  Synthetically generated peptide
  VARIANT (1)..(17): Xaa = Any Amino Acid
CCXEXXFCCNPXACTGC

SEQ ID NO: 4882 - protein, 17 aa, Artificial Sequence
  Synthetically generated peptide
  VARIANT (1)..(17): Xaa = Any Amino Acid
CCXEXXFCCNPAXCTGC

SEQ ID NO: 4883 - protein, 17 aa, Artificial Sequence
  Synthetically generated peptide
  VARIANT (1)..(17): Xaa = Any Amino Acid
CCXEXXFCCNPACXTGC

SEQ ID NO: 4884 - protein, 17 aa, Artificial Sequence
  Synthetically generated peptide
  VARIANT (1)..(17): Xaa = Any Amino Acid
CCXEXXFCCNPACTXGC

SEQ ID NO: 4885 - protein, 17 aa, Artificial Sequence
  Synthetically generated peptide
  VARIANT (1)..(17): Xaa = Any Amino Acid
CCXEXXFCCNPACTGXC

SEQ ID NO: 4886 - protein, 16 aa, Artificial Sequence
  Synthetically generated peptide
  VARIANT (1)..(16): Xaa = Any Amino Acid
CCXEXFXCCNPACTGC

SEQ ID NO: 4887 - protein, 17 aa, Artificial Sequence
  Synthetically generated peptide
  VARIANT (1)..(17): Xaa = Any Amino Acid
CCXEXFXXCCNPACTGC

SEQ ID NO: 4888 - protein, 17 aa, Artificial Sequence
  Synthetically generated peptide
  VARIANT (1)..(17): Xaa = Any Amino Acid
CCXEXFXCCXNPACTGC

SEQ ID NO: 4889 - protein, 17 aa, Artificial Sequence
  Synthetically generated peptide
  VARIANT (1)..(17): Xaa = Any Amino Acid
CCXEXFXCCNXPACTGC

SEQ ID NO: 4890 - protein, 17 aa, Artificial Sequence
  Synthetically generated peptide
  VARIANT (1)..(17): Xaa = Any Amino Acid
CCXEXFXCCNPXACTGC

SEQ ID NO: 4891 - protein, 17 aa, Artificial Sequence
  Synthetically generated peptide
  VARIANT (1)..(17): Xaa = Any Amino Acid
CCXEXFXCCNPAXCTGC

SEQ ID NO: 4892 - protein, 17 aa, Artificial Sequence
  Synthetically generated peptide
  VARIANT (1)..(17): Xaa = Any Amino Acid
CCXEXFXCCNPACXTGC

SEQ ID NO: 4893 - protein, 17 aa, Artificial Sequence
  Synthetically generated peptide
  VARIANT (1)..(17): Xaa = Any Amino Acid
CCXEXFXCCNPACTXGC

SEQ ID NO: 4894 - protein, 17 aa, Artificial Sequence
  Synthetically generated peptide
  VARIANT (1)..(17): Xaa = Any Amino Acid
CCXEXFXCCNPACTGXC

SEQ ID NO: 4895 - protein, 16 aa, Artificial Sequence
  Synthetically generated peptide
  VARIANT (1)..(16): Xaa = Any Amino Acid
CCXEXFCCXNPACTGC

SEQ ID NO: 4896 - protein, 17 aa, Artificial Sequence
  Synthetically generated peptide
  VARIANT (1)..(17): Xaa = Any Amino Acid
CCXEXFCCXXNPACTGC

SEQ ID NO: 4897 - protein, 17 aa, Artificial Sequence
  Synthetically generated peptide
  VARIANT (1)..(17): Xaa = Any Amino Acid
CCXEXFCCXNXPACTGC

SEQ ID NO: 4898 - protein, 17 aa, Artificial Sequence
  Synthetically generated peptide
  VARIANT (1)..(17): Xaa = Any Amino Acid
CCXEXFCCXNPXACTGC

SEQ ID NO: 4899 - protein, 17 aa, Artificial Sequence
  Synthetically generated peptide
  VARIANT (1)..(17): Xaa = Any Amino Acid
CCXEXFCCXNPAXCTGC

SEQ ID NO: 4900 - protein, 17 aa, Artificial Sequence
  Synthetically generated peptide
  VARIANT (1)..(17): Xaa = Any Amino Acid
CCXEXFCCXNPACXTGC

SEQ ID NO: 4901 - protein, 17 aa, Artificial Sequence
  Synthetically generated peptide
  VARIANT (1)..(17): Xaa = Any Amino Acid
CCXEXFCCXNPACTXGC

SEQ ID NO: 4902 - protein, 17 aa, Artificial Sequence
  Synthetically generated peptide
  VARIANT (1)..(17): Xaa = Any Amino Acid
CCXEXFCCXNPACTGXC

SEQ ID NO: 4903 - protein, 16 aa, Artificial Sequence
  Synthetically generated peptide
  VARIANT (1)..(16): Xaa = Any Amino Acid
CCXEXFCCNXPACTGC

SEQ ID NO: 4904 - protein, 17 aa, Artificial Sequence
  Synthetically generated peptide
  VARIANT (1)..(17): Xaa = Any Amino Acid
CCXEXFCCNXXPACTGC

SEQ ID NO: 4905 - protein, 17 aa, Artificial Sequence
  Synthetically generated peptide
  VARIANT (1)..(17): Xaa = Any Amino Acid
CCXEXFCCNXPXACTGC

SEQ ID NO: 4906 - protein, 17 aa, Artificial Sequence
  Synthetically generated peptide
  VARIANT (1)..(17): Xaa = Any Amino Acid
CCXEXFCCNXPAXCTGC

SEQ ID NO: 4907 - protein, 17 aa, Artificial Sequence
  Synthetically generated peptide
  VARIANT (1)..(17): Xaa = Any Amino Acid
CCXEXFCCNXPACXTGC

SEQ ID NO: 4908 - protein, 17 aa, Artificial Sequence
  Synthetically generated peptide
  VARIANT (1)..(17): Xaa = Any Amino Acid
CCXEXFCCNXPACTXGC

SEQ ID NO: 4909 - protein, 17 aa, Artificial Sequence
  Synthetically generated peptide
  VARIANT (1)..(17): Xaa = Any Amino Acid
CCXEXFCCNXPACTGXC

SEQ ID NO: 4910 - protein, 16 aa, Artificial Sequence
  Synthetically generated peptide
  VARIANT (1)..(16): Xaa = Any Amino Acid
CCXEXFCCNPXACTGC

SEQ ID NO: 4911 - protein, 17 aa, Artificial Sequence
  Synthetically generated peptide
  VARIANT (1)..(17): Xaa = Any Amino Acid
CCXEXFCCNPXXACTGC

SEQ ID NO: 4912 - protein, 17 aa, Artificial Sequence
  Synthetically generated peptide
  VARIANT (1)..(17): Xaa = Any Amino Acid
CCXEXFCCNPXAXCTGC

SEQ ID NO: 4913 - protein, 17 aa, Artificial Sequence
  Synthetically generated peptide
  VARIANT (1)..(17): Xaa = Any Amino Acid
CCXEXFCCNPXACXTGC

SEQ ID NO: 4914 - protein, 17 aa, Artificial Sequence
  Synthetically generated peptide
  VARIANT (1)..(17): Xaa = Any Amino Acid
CCXEXFCCNPXACTXGC

SEQ ID NO: 4915 - protein, 17 aa, Artificial Sequence
  Synthetically generated peptide
  VARIANT (1)..(17): Xaa = Any Amino Acid
CCXEXFCCNPXACTGXC

SEQ ID NO: 4916 - protein, 16 aa, Artificial Sequence
  Synthetically generated peptide
  VARIANT (1)..(16): Xaa = Any Amino Acid
CCXEXFCCNPAXCTGC

SEQ ID NO: 4917 - protein, 17 aa, Artificial Sequence
  Synthetically generated peptide
  VARIANT (1)..(17): Xaa = Any Amino Acid
CCXEXFCCNPAXXCTGC

SEQ ID NO: 4918 - protein, 17 aa, Artificial Sequence
  Synthetically generated peptide
  VARIANT (1)..(17): Xaa = Any Amino Acid
CCXEXFCCNPAXCXTGC

SEQ ID NO: 4919 - protein, 17 aa, Artificial Sequence
  Synthetically generated peptide
  VARIANT (1)..(17): Xaa = Any Amino Acid
CCXEXFCCNPAXCTXGC

SEQ ID NO: 4920 - protein, 17 aa, Artificial Sequence
  Synthetically generated peptide
  VARIANT (1)..(17): Xaa = Any Amino Acid
CCXEXFCCNPAXCTGXC

SEQ ID NO: 4921 - protein, 16 aa, Artificial Sequence
  Synthetically generated peptide
  VARIANT (1)..(16): Xaa = Any Amino Acid
CCXEXFCCNPACXTGC

SEQ ID NO: 4922 - protein, 17 aa, Artificial Sequence
  Synthetically generated peptide
  VARIANT (1)..(17): Xaa = Any Amino Acid
CCXEXFCCNPACXXTGC

SEQ ID NO: 4923 - protein, 17 aa, Artificial Sequence
  Synthetically generated peptide
  VARIANT (1)..(17): Xaa = Any Amino Acid
CCXEXFCCNPACXTXGC

SEQ ID NO: 4924 - protein, 17 aa, Artificial Sequence
  Synthetically generated peptide
  VARIANT (1)..(17): Xaa = Any Amino Acid
CCXEXFCCNPACXTGXC

SEQ ID NO: 4925 - protein, 16 aa, Artificial Sequence
  Synthetically generated peptide
  VARIANT (1)..(16): Xaa = Any Amino Acid
CCXEXFCCNPACTXGC

SEQ ID NO: 4926 - protein, 17 aa, Artificial Sequence
  Synthetically generated peptide
  VARIANT (1)..(17): Xaa = Any Amino Acid
CCXEXFCCNPACTXXGC

SEQ ID NO: 4927 - protein, 17 aa, Artificial Sequence
  Synthetically generated peptide
  VARIANT (1)..(17): Xaa = Any Amino Acid
CCXEXFCCNPACTXGXC

SEQ ID NO: 4928 - protein, 16 aa, Artificial Sequence
  Synthetically generated peptide
  VARIANT (1)..(16): Xaa = Any Amino Acid
CCXEXFCCNPACTGXC

SEQ ID NO: 4929 - protein, 17 aa, Artificial Sequence
  Synthetically generated peptide
  VARIANT (1)..(17): Xaa = Any Amino Acid
CCXEXFCCNPACTGXXC

SEQ ID NO: 4930 - protein, 15 aa, Artificial Sequence
  Synthetically generated peptide
  VARIANT (1)..(15): Xaa = Any Amino Acid
CCXEFXCCNPACTGC

SEQ ID NO: 4931 - protein, 16 aa, Artificial Sequence
  Synthetically generated peptide
  VARIANT (1)..(16): Xaa = Any Amino Acid
CCXEFXXCCNPACTGC

SEQ ID NO: 4932 - protein, 17 aa, Artificial Sequence
  Synthetically generated peptide
  VARIANT (1)..(17): Xaa = Any Amino Acid
CCXEFXXXCCNPACTGC

SEQ ID NO: 4933 - protein, 17 aa, Artificial Sequence
  Synthetically generated peptide
  VARIANT (1)..(17): Xaa = Any Amino Acid
CCXEFXXCCXNPACTGC

SEQ ID NO: 4934 - protein, 17 aa, Artificial Sequence
  Synthetically generated peptide
  VARIANT (1)..(17): Xaa = Any Amino Acid
CCXEFXXCCNXPACTGC

SEQ ID NO: 4935 - protein, 17 aa, Artificial Sequence
  Synthetically generated peptide
  VARIANT (1)..(17): Xaa = Any Amino Acid
CCXEFXXCCNPXACTGC

SEQ ID NO: 4936 - protein, 17 aa, Artificial Sequence
  Synthetically generated peptide
  VARIANT (1)..(17): Xaa = Any Amino Acid
CCXEFXXCCNPAXCTGC

SEQ ID NO: 4937 - protein, 17 aa, Artificial Sequence
  Synthetically generated peptide
  VARIANT (1)..(17): Xaa = Any Amino Acid
CCXEFXXCCNPACXTGC

SEQ ID NO: 4938 - protein, 17 aa, Artificial Sequence
  Synthetically generated peptide
  VARIANT (1)..(17): Xaa = Any Amino Acid
CCXEFXXCCNPACTXGC

SEQ ID NO: 4939 - protein, 17 aa, Artificial Sequence
  Synthetically generated peptide
  VARIANT (1)..(17): Xaa = Any Amino Acid
CCXEFXXCCNPACTGXC

SEQ ID NO: 4940 - protein, 16 aa, Artificial Sequence
  Synthetically generated peptide
  VARIANT (1)..(16): Xaa = Any Amino Acid
CCXEFXCCXNPACTGC

SEQ ID NO: 4941 - protein, 17 aa, Artificial Sequence
  Synthetically generated peptide
  VARIANT (1)..(17): Xaa = Any Amino Acid
CCXEFXCCXXNPACTGC

SEQ ID NO: 4942 - protein, 17 aa, Artificial Sequence
  Synthetically generated peptide
  VARIANT (1)..(17): Xaa = Any Amino Acid
CCXEFXCCXNXPACTGC

SEQ ID NO: 4943 - protein, 17 aa, Artificial Sequence
  Synthetically generated peptide
  VARIANT (1)..(17): Xaa = Any Amino Acid
CCXEFXCCXNPXACTGC

SEQ ID NO: 4944 - protein, 17 aa, Artificial Sequence
  Synthetically generated peptide
  VARIANT (1)..(17): Xaa = Any Amino Acid
CCXEFXCCXNPAXCTGC

SEQ ID NO: 4945 - protein, 17 aa, Artificial Sequence
  Synthetically generated peptide
  VARIANT (1)..(17): Xaa = Any Amino Acid
CCXEFXCCXNPACXTGC

SEQ ID NO: 4946 - protein, 17 aa, Artificial Sequence
  Synthetically generated peptide
  VARIANT (1)..(17): Xaa = Any Amino Acid
CCXEFXCCXNPACTXGC

SEQ ID NO: 4947 - protein, 17 aa, Artificial Sequence
  Synthetically generated peptide
  VARIANT (1)..(17): Xaa = Any Amino Acid
CCXEFXCCXNPACTGXC

SEQ ID NO: 4948 - protein, 16 aa, Artificial Sequence
  Synthetically generated peptide
  VARIANT (1)..(16): Xaa = Any Amino Acid
CCXEFXCCNXPACTGC

SEQ ID NO: 4949 - protein, 17 aa, Artificial Sequence
  Synthetically generated peptide
  VARIANT (1)..(17): Xaa = Any Amino Acid
CCXEFXCCNXXPACTGC

SEQ ID NO: 4950 - protein, 17 aa, Artificial Sequence
  Synthetically generated peptide
  VARIANT (1)..(17): Xaa = Any Amino Acid
CCXEFXCCNXPXACTGC

SEQ ID NO: 4951 - protein, 17 aa, Artificial Sequence
  Synthetically generated peptide
  VARIANT (1)..(17): Xaa = Any Amino Acid
CCXEFXCCNXPAXCTGC

SEQ ID NO: 4952 - protein, 17 aa, Artificial Sequence
  Synthetically generated peptide
  VARIANT (1)..(17): Xaa = Any Amino Acid
CCXEFXCCNXPACXTGC

SEQ ID NO: 4953 - protein, 17 aa, Artificial Sequence
  Synthetically generated peptide
  VARIANT (1)..(17): Xaa = Any Amino Acid
CCXEFXCCNXPACTXGC

SEQ ID NO: 4954 - protein, 17 aa, Artificial Sequence
  Synthetically generated peptide
  VARIANT (1)..(17): Xaa = Any Amino Acid
CCXEFXCCNXPACTGXC

SEQ ID NO: 4955 - protein, 16 aa, Artificial Sequence
  Synthetically generated peptide
  VARIANT (1)..(16): Xaa = Any Amino Acid
CCXEFXCCNPXACTGC

SEQ ID NO: 4956 - protein, 17 aa, Artificial Sequence
  Synthetically generated peptide
  VARIANT (1)..(17): Xaa = Any Amino Acid
CCXEFXCCNPXXACTGC

SEQ ID NO: 4957 - protein, 17 aa, Artificial Sequence
  Synthetically generated peptide
  VARIANT (1)..(17): Xaa = Any Amino Acid
CCXEFXCCNPXAXCTGC

SEQ ID NO: 4958 - protein, 17 aa, Artificial Sequence
  Synthetically generated peptide
  VARIANT (1)..(17): Xaa = Any Amino Acid
CCXEFXCCNPXACXTGC

SEQ ID NO: 4959 - protein, 17 aa, Artificial Sequence
  Synthetically generated peptide
  VARIANT (1)..(17): Xaa = Any Amino Acid
CCXEFXCCNPXACTXGC

SEQ ID NO: 4960 - protein, 17 aa, Artificial Sequence
  Synthetically generated peptide
  VARIANT (1)..(17): Xaa = Any Amino Acid
CCXEFXCCNPXACTGXC

SEQ ID NO: 4961 - protein, 16 aa, Artificial Sequence
  Synthetically generated peptide
  VARIANT (1)..(16): Xaa = Any Amino Acid
CCXEFXCCNPAXCTGC

SEQ ID NO: 4962 - protein, 17 aa, Artificial Sequence
  Synthetically generated peptide
  VARIANT (1)..(17): Xaa = Any Amino Acid
CCXEFXCCNPAXXCTGC

SEQ ID NO: 4963 - protein, 17 aa, Artificial Sequence
  Synthetically generated peptide
  VARIANT (1)..(17): Xaa = Any Amino Acid
CCXEFXCCNPAXCXTGC

SEQ ID NO: 4964 - protein, 17 aa, Artificial Sequence
  Synthetically generated peptide
  VARIANT (1)..(17): Xaa = Any Amino Acid
CCXEFXCCNPAXCTXGC

SEQ ID NO: 4965 - protein, 17 aa, Artificial Sequence
  Synthetically generated peptide
  VARIANT (1)..(17): Xaa = Any Amino Acid
CCXEFXCCNPAXCTGXC

SEQ ID NO: 4966 - protein, 16 aa, Artificial Sequence
  Synthetically generated peptide
  VARIANT (1)..(16): Xaa = Any Amino Acid
CCXEFXCCNPACXTGC

SEQ ID NO: 4967 - protein, 17 aa, Artificial Sequence
  Synthetically generated peptide
  VARIANT (1)..(17): Xaa = Any Amino Acid
CCXEFXCCNPACXXTGC

SEQ ID NO: 4968 - protein, 17 aa, Artificial Sequence
  Synthetically generated peptide
  VARIANT (1)..(17): Xaa = Any Amino Acid
CCXEFXCCNPACXTXGC

SEQ ID NO: 4969 - protein, 17 aa, Artificial Sequence
  Synthetically generated peptide
  VARIANT (1)..(17): Xaa = Any Amino Acid
CCXEFXCCNPACXTGXC

SEQ ID NO: 4970 - protein, 16 aa, Artificial Sequence
  Synthetically generated peptide
  VARIANT (1)..(16): Xaa = Any Amino Acid
CCXEFXCCNPACTXGC

SEQ ID NO: 4971 - protein, 17 aa, Artificial Sequence
  Synthetically generated peptide
  VARIANT (1)..(17): Xaa = Any Amino Acid
CCXEFXCCNPACTXXGC

SEQ ID NO: 4972 - protein, 17 aa, Artificial Sequence
  Synthetically generated peptide
  VARIANT (1)..(17): Xaa = Any Amino Acid
CCXEFXCCNPACTXGXC

SEQ ID NO: 4973 - protein, 16 aa, Artificial Sequence
  Synthetically generated peptide
  VARIANT (1)..(16): Xaa = Any Amino Acid
CCXEFXCCNPACTGXC

SEQ ID NO: 4974 - protein, 17 aa, Artificial Sequence
  Synthetically generated peptide
  VARIANT (1)..(17): Xaa = Any Amino Acid
CCXEFXCCNPACTGXXC

SEQ ID NO: 4975 - protein, 15 aa, Artificial Sequence
  Synthetically generated peptide
  VARIANT (1)..(15): Xaa = Any Amino Acid
CCXEFCCXNPACTGC

SEQ ID NO: 4976 - protein, 16 aa, Artificial Sequence
  Synthetically generated peptide
  VARIANT (1)..(16): Xaa = Any Amino Acid
CCXEFCCXXNPACTGC

SEQ ID NO: 4977 - protein, 17 aa, Artificial Sequence
  Synthetically generated peptide
  VARIANT (1)..(17): Xaa = Any Amino Acid
CCXEFCCXXXNPACTGC

SEQ ID NO: 4978 - protein, 17 aa, Artificial Sequence
  Synthetically generated peptide
  VARIANT (1)..(17): Xaa = Any Amino Acid
CCXEFCCXXNXPACTGC

SEQ ID NO: 4979 - protein, 17 aa, Artificial Sequence
  Synthetically generated peptide
  VARIANT (1)..(17): Xaa = Any Amino Acid
CCXEFCCXXNPXACTGC

SEQ ID NO: 4980 - protein, 17 aa, Artificial Sequence
  Synthetically generated peptide
  VARIANT (1)..(17): Xaa = Any Amino Acid
CCXEFCCXXNPAXCTGC

SEQ ID NO: 4981 - protein, 17 aa, Artificial Sequence
  Synthetically generated peptide
  VARIANT (1)..(17): Xaa = Any Amino Acid
CCXEFCCXXNPACXTGC

SEQ ID NO: 4982 - protein, 17 aa, Artificial Sequence
  Synthetically generated peptide
  VARIANT (1)..(17): Xaa = Any Amino Acid
CCXEFCCXXNPACTXGC

SEQ ID NO: 4983 - protein, 17 aa, Artificial Sequence
  Synthetically generated peptide
  VARIANT (1)..(17): Xaa = Any Amino Acid
CCXEFCCXXNPACTGXC

SEQ ID NO: 4984 - protein, 16 aa, Artificial Sequence
  Synthetically generated peptide
  VARIANT (1)..(16): Xaa = Any Amino Acid
CCXEFCCXNXPACTGC

SEQ ID NO: 4985 - protein, 17 aa, Artificial Sequence
  Synthetically generated peptide
  VARIANT (1)..(17): Xaa = Any Amino Acid
CCXEFCCXNXXPACTGC

SEQ ID NO: 4986 - protein, 17 aa, Artificial Sequence
  Synthetically generated peptide
  VARIANT (1)..(17): Xaa = Any Amino Acid
CCXEFCCXNXPXACTGC

SEQ ID NO: 4987 - protein, 17 aa, Artificial Sequence
  Synthetically generated peptide
  VARIANT (1)..(17): Xaa = Any Amino Acid
CCXEFCCXNXPAXCTGC

SEQ ID NO: 4988 - protein, 17 aa, Artificial Sequence
  Synthetically generated peptide
  VARIANT (1)..(17): Xaa = Any Amino Acid
CCXEFCCXNXPACXTGC

SEQ ID NO: 4989 - protein, 17 aa, Artificial Sequence
  Synthetically generated peptide
  VARIANT (1)..(17): Xaa = Any Amino Acid
CCXEFCCXNXPACTXGC

SEQ ID NO: 4990 - protein, 17 aa, Artificial Sequence
  Synthetically generated peptide
  VARIANT (1)..(17): Xaa = Any Amino Acid
CCXEFCCXNXPACTGXC

SEQ ID NO: 4991 - protein, 16 aa, Artificial Sequence
  Synthetically generated peptide
  VARIANT (1)..(16): Xaa = Any Amino Acid
CCXEFCCXNPXACTGC

SEQ ID NO: 4992 - protein, 17 aa, Artificial Sequence
  Synthetically generated peptide
  VARIANT (1)..(17): Xaa = Any Amino Acid
CCXEFCCXNPXXACTGC

SEQ ID NO: 4993 - protein, 17 aa, Artificial Sequence
  Synthetically generated peptide
  VARIANT (1)..(17): Xaa = Any Amino Acid
CCXEFCCXNPXAXCTGC

SEQ ID NO: 4994 - protein, 17 aa, Artificial Sequence
  Synthetically generated peptide
  VARIANT (1)..(17): Xaa = Any Amino Acid
CCXEFCCXNPXACXTGC

SEQ ID NO: 4995 - protein, 17 aa, Artificial Sequence
  Synthetically generated peptide
  VARIANT (1)..(17): Xaa = Any Amino Acid
CCXEFCCXNPXACTXGC

SEQ ID NO: 4996 - protein, 17 aa, Artificial Sequence
  Synthetically generated peptide
  VARIANT (1)..(17): Xaa = Any Amino Acid
CCXEFCCXNPXACTGXC

SEQ ID NO: 4997 - protein, 16 aa, Artificial Sequence
  Synthetically generated peptide
  VARIANT (1)..(16): Xaa = Any Amino Acid
CCXEFCCXNPAXCTGC

SEQ ID NO: 4998 - protein, 17 aa, Artificial Sequence
  Synthetically generated peptide
  VARIANT (1)..(17): Xaa = Any Amino Acid
CCXEFCCXNPAXXCTGC

SEQ ID NO: 4999 - protein, 17 aa, Artificial Sequence
  Synthetically generated peptide
  VARIANT (1)..(17): Xaa = Any Amino Acid
CCXEFCCXNPAXCXTGC

SEQ ID NO: 5000 - protein, 17 aa, Artificial Sequence
  Synthetically generated peptide
  VARIANT (1)..(17): Xaa = Any Amino Acid
CCXEFCCXNPAXCTXGC

SEQ ID NO: 5001 - protein, 17 aa, Artificial Sequence
  Synthetically generated peptide
  VARIANT (1)..(17): Xaa = Any Amino Acid
CCXEFCCXNPAXCTGXC

SEQ ID NO: 5002 - protein, 16 aa, Artificial Sequence
  Synthetically generated peptide
  VARIANT (1)..(16): Xaa = Any Amino Acid
CCXEFCCXNPACXTGC

SEQ ID NO: 5003 - protein, 17 aa, Artificial Sequence
  Synthetically generated peptide
  VARIANT (1)..(17): Xaa = Any Amino Acid
CCXEFCCXNPACXXTGC

SEQ ID NO: 5004 - protein, 17 aa, Artificial Sequence
  Synthetically generated peptide
  VARIANT (1)..(17): Xaa = Any Amino Acid
CCXEFCCXNPACXTXGC

SEQ ID NO: 5005 - protein, 17 aa, Artificial Sequence
  Synthetically generated peptide
  VARIANT (1)..(17): Xaa = Any Amino Acid
CCXEFCCXNPACXTGXC

SEQ ID NO: 5006 - protein, 16 aa, Artificial Sequence
  Synthetically generated peptide
  VARIANT (1)..(16): Xaa = Any Amino Acid
CCXEFCCXNPACTXGC

SEQ ID NO: 5007 - protein, 17 aa, Artificial Sequence
  Synthetically generated peptide
  VARIANT (1)..(17): Xaa = Any Amino Acid
CCXEFCCXNPACTXXGC

SEQ ID NO: 5008 - protein, 17 aa, Artificial Sequence
  Synthetically generated peptide
  VARIANT (1)..(17): Xaa = Any Amino Acid
CCXEFCCXNPACTXGXC

SEQ ID NO: 5009 - protein, 16 aa, Artificial Sequence
  Synthetically generated peptide
  VARIANT (1)..(16): Xaa = Any Amino Acid
CCXEFCCXNPACTGXC

SEQ ID NO: 5010 - protein, 17 aa, Artificial Sequence
  Synthetically generated peptide
  VARIANT (1)..(17): Xaa = Any Amino Acid
CCXEFCCXNPACTGXXC

SEQ ID NO: 5011 - protein, 15 aa, Artificial Sequence
  Synthetically generated peptide
  VARIANT (1)..(15): Xaa = Any Amino Acid
CCXEFCCNXPACTGC

SEQ ID NO: 5012 - protein, 16 aa, Artificial Sequence
  Synthetically generated peptide
  VARIANT (1)..(16): Xaa = Any Amino Acid
CCXEFCCNXXPACTGC

SEQ ID NO: 5013 - protein, 17 aa, Artificial Sequence
  Synthetically generated peptide
  VARIANT (1)..(17): Xaa = Any Amino Acid
CCXEFCCNXXXPACTGC

SEQ ID NO: 5014 - protein, 17 aa, Artificial Sequence
  Synthetically generated peptide
  VARIANT (1)..(17): Xaa = Any Amino Acid
CCXEFCCNXXPXACTGC

SEQ ID NO: 5015 - protein, 17 aa, Artificial Sequence
  Synthetically generated peptide
  VARIANT (1)..(17): Xaa = Any Amino Acid
CCXEFCCNXXPAXCTGC

SEQ ID NO: 5016 - protein, 17 aa, Artificial Sequence
  Synthetically generated peptide
  VARIANT (1)..(17): Xaa = Any Amino Acid
CCXEFCCNXXPACXTGC

SEQ ID NO: 5017 - protein, 17 aa, Artificial Sequence
  Synthetically generated peptide
  VARIANT (1)..(17): Xaa = Any Amino Acid
CCXEFCCNXXPACTXGC

SEQ ID NO: 5018 - protein, 17 aa, Artificial Sequence
  Synthetically generated peptide
  VARIANT (1)..(17): Xaa = Any Amino Acid
CCXEFCCNXXPACTGXC

SEQ ID NO: 5019 - protein, 16 aa, Artificial Sequence
  Synthetically generated peptide
  VARIANT (1)..(16): Xaa = Any Amino Acid
CCXEFCCNXPXACTGC

SEQ ID NO: 5020 - protein, 17 aa, Artificial Sequence
  Synthetically generated peptide
  VARIANT (1)..(17): Xaa = Any Amino Acid
CCXEFCCNXPXXACTGC

SEQ ID NO: 5021 - protein, 17 aa, Artificial Sequence
  Synthetically generated peptide
  VARIANT (1)..(17): Xaa = Any Amino Acid
CCXEFCCNXPXAXCTGC

SEQ ID NO: 5022 - protein, 17 aa, Artificial Sequence
  Synthetically generated peptide
  VARIANT (1)..(17): Xaa = Any Amino Acid
CCXEFCCNXPXACXTGC

SEQ ID NO: 5023 - protein, 17 aa, Artificial Sequence
  Synthetically generated peptide
  VARIANT (1)..(17): Xaa = Any Amino Acid
CCXEFCCNXPXACTXGC

SEQ ID NO: 5024 - protein, 17 aa, Artificial Sequence
  Synthetically generated peptide
  VARIANT (1)..(17): Xaa = Any Amino Acid
CCXEFCCNXPXACTGXC

SEQ ID NO: 5025 - protein, 16 aa, Artificial Sequence
  Synthetically generated peptide
  VARIANT (1)..(16): Xaa = Any Amino Acid
CCXEFCCNXPAXCTGC

SEQ ID NO: 5026 - protein, 17 aa, Artificial Sequence
  Synthetically generated peptide
  VARIANT (1)..(17): Xaa = Any Amino Acid
CCXEFCCNXPAXXCTGC

SEQ ID NO: 5027 - protein, 17 aa, Artificial Sequence
  Synthetically generated peptide
  VARIANT (1)..(17): Xaa = Any Amino Acid
CCXEFCCNXPAXCXTGC

SEQ ID NO: 5028 - protein, 17 aa, Artificial Sequence
  Synthetically generated peptide
  VARIANT (1)..(17): Xaa = Any Amino Acid
CCXEFCCNXPAXCTXGC

SEQ ID NO: 5029 - protein, 17 aa, Artificial Sequence
  Synthetically generated peptide
  VARIANT (1)..(17): Xaa = Any Amino Acid
CCXEFCCNXPAXCTGXC

SEQ ID NO: 5030 - protein, 16 aa, Artificial Sequence
  Synthetically generated peptide
  VARIANT (1)..(16): Xaa = Any Amino Acid
CCXEFCCNXPACXTGC

SEQ ID NO: 5031 - protein, 17 aa, Artificial Sequence
  Synthetically generated peptide
  VARIANT (1)..(17): Xaa = Any Amino Acid
CCXEFCCNXPACXXTGC

SEQ ID NO: 5032 - protein, 17 aa, Artificial Sequence
  Synthetically generated peptide
  VARIANT (1)..(17): Xaa = Any Amino Acid
CCXEFCCNXPACXTXGC

SEQ ID NO: 5033 - protein, 17 aa, Artificial Sequence
  Synthetically generated peptide
  VARIANT (1)..(17): Xaa = Any Amino Acid
CCXEFCCNXPACXTGXC

SEQ ID NO: 5034 - protein, 16 aa, Artificial Sequence
  Synthetically generated peptide
  VARIANT (1)..(16): Xaa = Any Amino Acid
CCXEFCCNXPACTXGC

SEQ ID NO: 5035 - protein, 17 aa, Artificial Sequence
  Synthetically generated peptide
  VARIANT (1)..(17): Xaa = Any Amino Acid
CCXEFCCNXPACTXXGC

SEQ ID NO: 5036 - protein, 17 aa, Artificial Sequence
  Synthetically generated peptide
  VARIANT (1)..(17): Xaa = Any Amino Acid
CCXEFCCNXPACTXGXC

SEQ ID NO: 5037 - protein, 16 aa, Artificial Sequence
  Synthetically generated peptide
  VARIANT (1)..(16): Xaa = Any Amino Acid
CCXEFCCNXPACTGXC

SEQ ID NO: 5038 - protein, 17 aa, Artificial Sequence
  Synthetically generated peptide
  VARIANT (1)..(17): Xaa = Any Amino Acid
CCXEFCCNXPACTGXXC

SEQ ID NO: 5039 - protein, 15 aa, Artificial Sequence
  Synthetically generated peptide
  VARIANT (1)..(15): Xaa = Any Amino Acid
CCXEFCCNPXACTGC

SEQ ID NO: 5040 - protein, 16 aa, Artificial Sequence
  Synthetically generated peptide
  VARIANT (1)..(16): Xaa = Any Amino Acid
CCXEFCCNPXXACTGC

SEQ ID NO: 5041 - protein, 17 aa, Artificial Sequence
  Synthetically generated peptide
  VARIANT (1)..(17): Xaa = Any Amino Acid
CCXEFCCNPXXXACTGC

SEQ ID NO: 5042 - protein, 17 aa, Artificial Sequence
  Synthetically generated peptide
  VARIANT (1)..(17): Xaa = Any Amino Acid
CCXEFCCNPXXAXCTGC

SEQ ID NO: 5043 - protein, 17 aa, Artificial Sequence
  Synthetically generated peptide
  VARIANT (1)..(17): Xaa = Any Amino Acid
CCXEFCCNPXXACXTGC

SEQ ID NO: 5044 - protein, 17 aa, Artificial Sequence
  Synthetically generated peptide
  VARIANT (1)..(17): Xaa = Any Amino Acid
CCXEFCCNPXXACTXGC

SEQ ID NO: 5045 - protein, 17 aa, Artificial Sequence
  Synthetically generated peptide
  VARIANT (1)..(17): Xaa = Any Amino Acid
CCXEFCCNPXXACTGXC

SEQ ID NO: 5046 - protein, 16 aa, Artificial Sequence
  Synthetically generated peptide
  VARIANT (1)..(16): Xaa = Any Amino Acid
CCXEFCCNPXAXCTGC

SEQ ID NO: 5047 - protein, 17 aa, Artificial Sequence
  Synthetically generated peptide
  VARIANT (1)..(17): Xaa = Any Amino Acid
CCXEFCCNPXAXXCTGC

SEQ ID NO: 5048 - protein, 17 aa, Artificial Sequence
  Synthetically generated peptide
  VARIANT (1)..(17): Xaa = Any Amino Acid
CCXEFCCNPXAXCXTGC

SEQ ID NO: 5049 - protein, 17 aa, Artificial Sequence
  Synthetically generated peptide
  VARIANT (1)..(17): Xaa = Any Amino Acid
CCXEFCCNPXAXCTXGC

SEQ ID NO: 5050 - protein, 17 aa, Artificial Sequence
  Synthetically generated peptide
  VARIANT (1)..(17): Xaa = Any Amino Acid
CCXEFCCNPXAXCTGXC

SEQ ID NO: 5051 - protein, 16 aa, Artificial Sequence
  Synthetically generated peptide
  VARIANT (1)..(16): Xaa = Any Amino Acid
CCXEFCCNPXACXTGC

SEQ ID NO: 5052 - protein, 17 aa, Artificial Sequence
  Synthetically generated peptide
  VARIANT (1)..(17): Xaa = Any Amino Acid
CCXEFCCNPXACXXTGC

SEQ ID NO: 5053 - protein, 17 aa, Artificial Sequence
  Synthetically generated peptide
  VARIANT (1)..(17): Xaa = Any Amino Acid
CCXEFCCNPXACXTXGC

SEQ ID NO: 5054 - protein, 17 aa, Artificial Sequence
  Synthetically generated peptide
  VARIANT (1)..(17): Xaa = Any Amino Acid
CCXEFCCNPXACXTGXC

SEQ ID NO: 5055 - protein, 16 aa, Artificial Sequence
  Synthetically generated peptide
  VARIANT (1)..(16): Xaa = Any Amino Acid
CCXEFCCNPXACTXGC

SEQ ID NO: 5056 - protein, 17 aa, Artificial Sequence
  Synthetically generated peptide
  VARIANT (1)..(17): Xaa = Any Amino Acid
CCXEFCCNPXACTXXGC

SEQ ID NO: 5057 - protein, 17 aa, Artificial Sequence
  Synthetically generated peptide
  VARIANT (1)..(17): Xaa = Any Amino Acid
CCXEFCCNPXACTXGXC

SEQ ID NO: 5058 - protein, 16 aa, Artificial Sequence
  Synthetically generated peptide
  VARIANT (1)..(16): Xaa = Any Amino Acid
CCXEFCCNPXACTGXC

SEQ ID NO: 5059 - protein, 17 aa, Artificial Sequence
  Synthetically generated peptide
  VARIANT (1)..(17): Xaa = Any Amino Acid
CCXEFCCNPXACTGXXC

SEQ ID NO: 5060 - protein, 15 aa, Artificial Sequence
  Synthetically generated peptide
  VARIANT (1)..(15): Xaa = Any Amino Acid
CCXEFCCNPAXCTGC

SEQ ID NO: 5061 - protein, 16 aa, Artificial Sequence
  Synthetically generated peptide
  VARIANT (1)..(16): Xaa = Any Amino Acid
CCXEFCCNPAXXCTGC

SEQ ID NO: 5062 - protein, 17 aa, Artificial Sequence
  Synthetically generated peptide
  VARIANT (1)..(17): Xaa = Any Amino Acid
CCXEFCCNPAXXXCTGC

SEQ ID NO: 5063 - protein, 17 aa, Artificial Sequence
  Synthetically generated peptide
  VARIANT (1)..(17): Xaa = Any Amino Acid
CCXEFCCNPAXXCXTGC

SEQ ID NO: 5064 - protein, 17 aa, Artificial Sequence
  Synthetically generated peptide
  VARIANT (1)..(17): Xaa = Any Amino Acid
CCXEFCCNPAXXCTXGC

SEQ ID NO: 5065 - protein, 17 aa, Artificial Sequence
  Synthetically generated peptide
  VARIANT (1)..(17): Xaa = Any Amino Acid
CCXEFCCNPAXXCTGXC

SEQ ID NO: 5066 - protein, 16 aa, Artificial Sequence
  Synthetically generated peptide
  VARIANT (1)..(16): Xaa = Any Amino Acid
CCXEFCCNPAXCXTGC

SEQ ID NO: 5067 - protein, 17 aa, Artificial Sequence
  Synthetically generated peptide
  VARIANT (1)..(17): Xaa = Any Amino Acid
CCXEFCCNPAXCXXTGC

SEQ ID NO: 5068 - protein, 17 aa, Artificial Sequence
  Synthetically generated peptide
  VARIANT (1)..(17): Xaa = Any Amino Acid
CCXEFCCNPAXCXTXGC

SEQ ID NO: 5069 - protein, 17 aa, Artificial Sequence
  Synthetically generated peptide
  VARIANT (1)..(17): Xaa = Any Amino Acid
CCXEFCCNPAXCXTGXC

SEQ ID NO: 5070 - protein, 16 aa, Artificial Sequence
  Synthetically generated peptide
  VARIANT (1)..(16): Xaa = Any Amino Acid
CCXEFCCNPAXCTXGC

SEQ ID NO: 5071 - protein, 17 aa, Artificial Sequence
  Synthetically generated peptide
  VARIANT (1)..(17): Xaa = Any Amino Acid
CCXEFCCNPAXCTXXGC

SEQ ID NO: 5072 - protein, 17 aa, Artificial Sequence
  Synthetically generated peptide
  VARIANT (1)..(17): Xaa = Any Amino Acid
CCXEFCCNPAXCTXGXC

SEQ ID NO: 5073 - protein, 16 aa, Artificial Sequence
  Synthetically generated peptide
  VARIANT (1)..(16): Xaa = Any Amino Acid
CCXEFCCNPAXCTGXC

SEQ ID NO: 5074 - protein, 17 aa, Artificial Sequence
  Synthetically generated peptide
  VARIANT (1)..(17): Xaa = Any Amino Acid
CCXEFCCNPAXCTGXXC

SEQ ID NO: 5075 - protein, 15 aa, Artificial Sequence
  Synthetically generated peptide
  VARIANT (1)..(15): Xaa = Any Amino Acid
CCXEFCCNPACXTGC

SEQ ID NO: 5076 - protein, 16 aa, Artificial Sequence
  Synthetically generated peptide
  VARIANT (1)..(16): Xaa = Any Amino Acid
CCXEFCCNPACXXTGC

SEQ ID NO: 5077 - protein, 17 aa, Artificial Sequence
  Synthetically generated peptide
  VARIANT (1)..(17): Xaa = Any Amino Acid
CCXEFCCNPACXXXTGC

SEQ ID NO: 5078 - protein, 17 aa, Artificial Sequence
  Synthetically generated peptide
  VARIANT (1)..(17): Xaa = Any Amino Acid
CCXEFCCNPACXXTXGC

SEQ ID NO: 5079 - protein, 17 aa, Artificial Sequence
  Synthetically generated peptide
  VARIANT (1)..(17): Xaa = Any Amino Acid
CCXEFCCNPACXXTGXC

SEQ ID NO: 5080 - protein, 16 aa, Artificial Sequence
  Synthetically generated peptide
  VARIANT (1)..(16): Xaa = Any Amino Acid
CCXEFCCNPACXTXGC

SEQ ID NO: 5081 - protein, 17 aa, Artificial Sequence
  Synthetically generated peptide
  VARIANT (1)..(17): Xaa = Any Amino Acid
CCXEFCCNPACXTXXGC

SEQ ID NO: 5082 - protein, 17 aa, Artificial Sequence
  Synthetically generated peptide
  VARIANT (1)..(17): Xaa = Any Amino Acid
CCXEFCCNPACXTXGXC

SEQ ID NO: 5083 - protein, 16 aa, Artificial Sequence
  Synthetically generated peptide
  VARIANT (1)..(16): Xaa = Any Amino Acid
CCXEFCCNPACXTGXC

SEQ ID NO: 5084 - protein, 17 aa, Artificial Sequence
  Synthetically generated peptide
  VARIANT (1)..(17): Xaa = Any Amino Acid
CCXEFCCNPACXTGXXC

SEQ ID NO: 5085 - protein, 15 aa, Artificial Sequence
  Synthetically generated peptide
  VARIANT (1)..(15): Xaa = Any Amino Acid
CCXEFCCNPACTXGC

SEQ ID NO: 5086 - protein, 16 aa, Artificial Sequence
  Synthetically generated peptide
  VARIANT (1)..(16): Xaa = Any Amino Acid
CCXEFCCNPACTXXGC

SEQ ID NO: 5087 - protein, 17 aa, Artificial Sequence
  Synthetically generated peptide
  VARIANT (1)..(17): Xaa = Any Amino Acid
CCXEFCCNPACTXXXGC

SEQ ID NO: 5088 - protein, 17 aa, Artificial Sequence
  Synthetically generated peptide
  VARIANT (1)..(17): Xaa = Any Amino Acid
CCXEFCCNPACTXXGXC

SEQ ID NO: 5089 - protein, 16 aa, Artificial Sequence
  Synthetically generated peptide
  VARIANT (1)..(16): Xaa = Any Amino Acid
CCXEFCCNPACTXGXC

SEQ ID NO: 5090 - protein, 17 aa, Artificial Sequence
  Synthetically generated peptide
  VARIANT (1)..(17): Xaa = Any Amino Acid
CCXEFCCNPACTXGXXC

SEQ ID NO: 5091 - protein, 15 aa, Artificial Sequence
  Synthetically generated peptide
  VARIANT (1)..(15): Xaa = Any Amino Acid
CCXEFCCNPACTGXC

SEQ ID NO: 5092 - protein, 16 aa, Artificial Sequence
  Synthetically generated peptide
  VARIANT (1)..(16): Xaa = Any Amino Acid
CCXEFCCNPACTGXXC

SEQ ID NO: 5093 - protein, 17 aa, Artificial Sequence
  Synthetically generated peptide
  VARIANT (1)..(17): Xaa = Any Amino Acid
CCXEFCCNPACTGXXXC

SEQ ID NO: 5094 - protein, 14 aa, Artificial Sequence
  Synthetically generated peptide
  VARIANT (1)..(14): Xaa = Any Amino Acid
CCEXFCCNPACTGC

SEQ ID NO: 5095 - protein, 15 aa, Artificial Sequence
  Synthetically generated peptide
  VARIANT (1)..(15): Xaa = Any Amino Acid
CCEXXFCCNPACTGC

SEQ ID NO: 5096 - protein, 16 aa, Artificial Sequence
  Synthetically generated peptide
  VARIANT (1)..(16): Xaa = Any Amino Acid
CCEXXXFCCNPACTGC

SEQ ID NO: 5097 - protein, 17 aa, Artificial Sequence
  Synthetically generated peptide
  VARIANT (1)..(17): Xaa = Any Amino Acid
CCEXXXXFCCNPACTGC

SEQ ID NO: 5098 - protein, 17 aa, Artificial Sequence
  Synthetically generated peptide
  VARIANT (1)..(17): Xaa = Any Amino Acid
CCEXXXFXCCNPACTGC

SEQ ID NO: 5099 - protein, 17 aa, Artificial Sequence
  Synthetically generated peptide
  VARIANT (1)..(17): Xaa = Any Amino Acid
CCEXXXFCCXNPACTGC

SEQ ID NO: 5100 - protein, 17 aa, Artificial Sequence
  Synthetically generated peptide
  VARIANT (1)..(17): Xaa = Any Amino Acid
CCEXXXFCCNXPACTGC

SEQ ID NO: 5101 - protein, 17 aa, Artificial Sequence
  Synthetically generated peptide
  VARIANT (1)..(17): Xaa = Any Amino Acid
CCEXXXFCCNPXACTGC

SEQ ID NO: 5102 - protein, 17 aa, Artificial Sequence
  Synthetically generated peptide
  VARIANT (1)..(17): Xaa = Any Amino Acid
CCEXXXFCCNPAXCTGC

SEQ ID NO: 5103 - protein, 17 aa, Artificial Sequence
  Synthetically generated peptide
  VARIANT (1)..(17): Xaa = Any Amino Acid
CCEXXXFCCNPACXTGC

SEQ ID NO: 5104 - protein, 17 aa, Artificial Sequence
  Synthetically generated peptide
  VARIANT (1)..(17): Xaa = Any Amino Acid
CCEXXXFCCNPACTXGC

SEQ ID NO: 5105 - protein, 17 aa, Artificial Sequence
  Synthetically generated peptide
  VARIANT (1)..(17): Xaa = Any Amino Acid
CCEXXXFCCNPACTGXC

SEQ ID NO: 5106 - protein, 16 aa, Artificial Sequence
  Synthetically generated peptide
  VARIANT (1)..(16): Xaa = Any Amino Acid
CCEXXFXCCNPACTGC

SEQ ID NO: 5107 - protein, 17 aa, Artificial Sequence
  Synthetically generated peptide
  VARIANT (1)..(17): Xaa = Any Amino Acid
CCEXXFXXCCNPACTGC

SEQ ID NO: 5108 - protein, 17 aa, Artificial Sequence
  Synthetically generated peptide
  VARIANT (1)..(17): Xaa = Any Amino Acid
CCEXXFXCCXNPACTGC

SEQ ID NO: 5109 - protein, 17 aa, Artificial Sequence
  Synthetically generated peptide
  VARIANT (1)..(17): Xaa = Any Amino Acid
CCEXXFXCCNXPACTGC

SEQ ID NO: 5110 - protein, 17 aa, Artificial Sequence
  Synthetically generated peptide
  VARIANT (1)..(17): Xaa = Any Amino Acid
CCEXXFXCCNPXACTGC

SEQ ID NO: 5111 - protein, 17 aa, Artificial Sequence
  Synthetically generated peptide
  VARIANT (1)..(17): Xaa = Any Amino Acid
CCEXXFXCCNPAXCTGC

SEQ ID NO: 5112 - protein, 17 aa, Artificial Sequence
  Synthetically generated peptide
  VARIANT (1)..(17): Xaa = Any Amino Acid
CCEXXFXCCNPACXTGC

SEQ ID NO: 5113 - protein, 17 aa, Artificial Sequence
  Synthetically generated peptide
  VARIANT (1)..(17): Xaa = Any Amino Acid
CCEXXFXCCNPACTXGC

SEQ ID NO: 5114 - protein, 17 aa, Artificial Sequence
  Synthetically generated peptide
  VARIANT (1)..(17): Xaa = Any Amino Acid
CCEXXFXCCNPACTGXC

SEQ ID NO: 5115 - protein, 16 aa, Artificial Sequence
  Synthetically generated peptide
  VARIANT (1)..(16): Xaa = Any Amino Acid
CCEXXFCCXNPACTGC

SEQ ID NO: 5116 - protein, 17 aa, Artificial Sequence
  Synthetically generated peptide
  VARIANT (1)..(17): Xaa = Any Amino Acid
CCEXXFCCXXNPACTGC

SEQ ID NO: 5117 - protein, 17 aa, Artificial Sequence
  Synthetically generated peptide
  VARIANT (1)..(17): Xaa = Any Amino Acid
CCEXXFCCXNXPACTGC

SEQ ID NO: 5118 - protein, 17 aa, Artificial Sequence
  Synthetically generated peptide
  VARIANT (1)..(17): Xaa = Any Amino Acid
CCEXXFCCXNPXACTGC

SEQ ID NO: 5119 - protein, 17 aa, Artificial Sequence
  Synthetically generated peptide
  VARIANT (1)..(17): Xaa = Any Amino Acid
CCEXXFCCXNPAXCTGC

SEQ ID NO: 5120 - protein, 17 aa, Artificial Sequence
  Synthetically generated peptide
  VARIANT (1)..(17): Xaa = Any Amino Acid
CCEXXFCCXNPACXTGC

SEQ ID NO: 5121 - protein, 17 aa, Artificial Sequence
  Synthetically generated peptide
  VARIANT (1)..(17): Xaa = Any Amino Acid
CCEXXFCCXNPACTXGC

SEQ ID NO: 5122 - protein, 17 aa, Artificial Sequence
  Synthetically generated peptide
  VARIANT (1)..(17): Xaa = Any Amino Acid
CCEXXFCCXNPACTGXC

SEQ ID NO: 5123 - protein, 16 aa, Artificial Sequence
  Synthetically generated peptide
  VARIANT (1)..(16): Xaa = Any Amino Acid
CCEXXFCCNXPACTGC

SEQ ID NO: 5124 - protein, 17 aa, Artificial Sequence
  Synthetically generated peptide
  VARIANT (1)..(17): Xaa = Any Amino Acid
CCEXXFCCNXXPACTGC

SEQ ID NO: 5125 - protein, 17 aa, Artificial Sequence
  Synthetically generated peptide
  VARIANT (1)..(17): Xaa = Any Amino Acid
CCEXXFCCNXPXACTGC

SEQ ID NO: 5126 - protein, 17 aa, Artificial Sequence
  Synthetically generated peptide
  VARIANT (1)..(17): Xaa = Any Amino Acid
CCEXXFCCNXPAXCTGC

SEQ ID NO: 5127 - protein, 17 aa, Artificial Sequence
  Synthetically generated peptide
  VARIANT (1)..(17): Xaa = Any Amino Acid
CCEXXFCCNXPACXTGC

SEQ ID NO: 5128 - protein, 17 aa, Artificial Sequence
  Synthetically generated peptide
  VARIANT (1)..(17): Xaa = Any Amino Acid
CCEXXFCCNXPACTXGC

SEQ ID NO: 5129 - protein, 17 aa, Artificial Sequence
  Synthetically generated peptide
  VARIANT (1)..(17): Xaa = Any Amino Acid
CCEXXFCCNXPACTGXC

SEQ ID NO: 5130 - protein, 16 aa, Artificial Sequence
  Synthetically generated peptide
  VARIANT (1)..(16): Xaa = Any Amino Acid
CCEXXFCCNPXACTGC

SEQ ID NO: 5131 - protein, 17 aa, Artificial Sequence
  Synthetically generated peptide
  VARIANT (1)..(17): Xaa = Any Amino Acid
CCEXXFCCNPXXACTGC

SEQ ID NO: 5132 - protein, 17 aa, Artificial Sequence
  Synthetically generated peptide
  VARIANT (1)..(17): Xaa = Any Amino Acid
CCEXXFCCNPXAXCTGC

SEQ ID NO: 5133 - protein, 17 aa, Artificial Sequence
  Synthetically generated peptide
  VARIANT (1)..(17): Xaa = Any Amino Acid
CCEXXFCCNPXACXTGC

SEQ ID NO: 5134 - protein, 17 aa, Artificial Sequence
  Synthetically generated peptide
  VARIANT (1)..(17): Xaa = Any Amino Acid
CCEXXFCCNPXACTXGC

SEQ ID NO: 5135 - protein, 17 aa, Artificial Sequence
  Synthetically generated peptide
  VARIANT (1)..(17): Xaa = Any Amino Acid
CCEXXFCCNPXACTGXC

SEQ ID NO: 5136 - protein, 16 aa, Artificial Sequence
  Synthetically generated peptide
  VARIANT (1)..(16): Xaa = Any Amino Acid
CCEXXFCCNPAXCTGC

SEQ ID NO: 5137 - protein, 17 aa, Artificial Sequence
  Synthetically generated peptide
  VARIANT (1)..(17): Xaa = Any Amino Acid
CCEXXFCCNPAXXCTGC

SEQ ID NO: 5138 - protein, 17 aa, Artificial Sequence
  Synthetically generated peptide
  VARIANT (1)..(17): Xaa = Any Amino Acid
CCEXXFCCNPAXCXTGC

SEQ ID NO: 5139 - protein, 17 aa, Artificial Sequence
  Synthetically generated peptide
  VARIANT (1)..(17): Xaa = Any Amino Acid
CCEXXFCCNPAXCTXGC

SEQ ID NO: 5140 - protein, 17 aa, Artificial Sequence
  Synthetically generated peptide
  VARIANT (1)..(17): Xaa = Any Amino Acid
CCEXXFCCNPAXCTGXC

SEQ ID NO: 5141 - protein, 16 aa, Artificial Sequence
  Synthetically generated peptide
  VARIANT (1)..(16): Xaa = Any Amino Acid
CCEXXFCCNPACXTGC

SEQ ID NO: 5142 - protein, 17 aa, Artificial Sequence
  Synthetically generated peptide
  VARIANT (1)..(17): Xaa = Any Amino Acid
CCEXXFCCNPACXXTGC

SEQ ID NO: 5143 - protein, 17 aa, Artificial Sequence
  Synthetically generated peptide
  VARIANT (1)..(17): Xaa = Any Amino Acid
CCEXXFCCNPACXTXGC

SEQ ID NO: 5144 - protein, 17 aa, Artificial Sequence
  Synthetically generated peptide
  VARIANT (1)..(17): Xaa = Any Amino Acid
CCEXXFCCNPACXTGXC

SEQ ID NO: 5145 - protein, 16 aa, Artificial Sequence
  Synthetically generated peptide
  VARIANT (1)..(16): Xaa = Any Amino Acid
CCEXXFCCNPACTXGC

SEQ ID NO: 5146 - protein, 17 aa, Artificial Sequence
  Synthetically generated peptide
  VARIANT (1)..(17): Xaa = Any Amino Acid
CCEXXFCCNPACTXXGC

SEQ ID NO: 5147 - protein, 17 aa, Artificial Sequence
  Synthetically generated peptide
  VARIANT (1)..(17): Xaa = Any Amino Acid
CCEXXFCCNPACTXGXC

SEQ ID NO: 5148 - protein, 16 aa, Artificial Sequence
  Synthetically generated peptide
  VARIANT (1)..(16): Xaa = Any Amino Acid
CCEXXFCCNPACTGXC

SEQ ID NO: 5149 - protein, 17 aa, Artificial Sequence
  Synthetically generated peptide
  VARIANT (1)..(17): Xaa = Any Amino Acid
CCEXXFCCNPACTGXXC

SEQ ID NO: 5150 - protein, 15 aa, Artificial Sequence
  Synthetically generated peptide
  VARIANT (1)..(15): Xaa = Any Amino Acid
CCEXFXCCNPACTGC

SEQ ID NO: 5151 - protein, 16 aa, Artificial Sequence
  Synthetically generated peptide
  VARIANT (1)..(16): Xaa = Any Amino Acid
CCEXFXXCCNPACTGC

SEQ ID NO: 5152 - protein, 17 aa, Artificial Sequence
  Synthetically generated peptide
  VARIANT (1)..(17): Xaa = Any Amino Acid
CCEXFXXXCCNPACTGC

SEQ ID NO: 5153 - protein, 17 aa, Artificial Sequence
  Synthetically generated peptide
  VARIANT (1)..(17): Xaa = Any Amino Acid
CCEXFXXCCXNPACTGC

SEQ ID NO: 5154 - protein, 17 aa, Artificial Sequence
  Synthetically generated peptide
  VARIANT (1)..(17): Xaa = Any Amino Acid
CCEXFXXCCNXPACTGC

SEQ ID NO: 5155 - protein, 17 aa, Artificial Sequence
  Synthetically generated peptide
  VARIANT (1)..(17): Xaa = Any Amino Acid
CCEXFXXCCNPXACTGC

SEQ ID NO: 5156 - protein, 17 aa, Artificial Sequence
  Synthetically generated peptide
  VARIANT (1)..(17): Xaa = Any Amino Acid
CCEXFXXCCNPAXCTGC

SEQ ID NO: 5157 - protein, 17 aa, Artificial Sequence
  Synthetically generated peptide
  VARIANT (1)..(17): Xaa = Any Amino Acid
CCEXFXXCCNPACXTGC

SEQ ID NO: 5158 - protein, 17 aa, Artificial Sequence
  Synthetically generated peptide
  VARIANT (1)..(17): Xaa = Any Amino Acid
CCEXFXXCCNPACTXGC

SEQ ID NO: 5159 - protein, 17 aa, Artificial Sequence
  Synthetically generated peptide
  VARIANT (1)..(17): Xaa = Any Amino Acid
CCEXFXXCCNPACTGXC

SEQ ID NO: 5160 - protein, 16 aa, Artificial Sequence
  Synthetically generated peptide
  VARIANT (1)..(16): Xaa = Any Amino Acid
CCEXFXCCXNPACTGC

SEQ ID NO: 5161 - protein, 17 aa, Artificial Sequence
  Synthetically generated peptide
  VARIANT (1)..(17): Xaa = Any Amino Acid
CCEXFXCCXXNPACTGC

SEQ ID NO: 5162 - protein, 17 aa, Artificial Sequence
  Synthetically generated peptide
  VARIANT (1)..(17): Xaa = Any Amino Acid
CCEXFXCCXNXPACTGC

SEQ ID NO: 5163 - protein, 17 aa, Artificial Sequence
  Synthetically generated peptide
  VARIANT (1)..(17): Xaa = Any Amino Acid
CCEXFXCCXNPXACTGC

SEQ ID NO: 5164 - protein, 17 aa, Artificial Sequence
  Synthetically generated peptide
  VARIANT (1)..(17): Xaa = Any Amino Acid
CCEXFXCCXNPAXCTGC

SEQ ID NO: 5165 - protein, 17 aa, Artificial Sequence
  Synthetically generated peptide
  VARIANT (1)..(17): Xaa = Any Amino Acid
CCEXFXCCXNPACXTGC

SEQ ID NO: 5166 - protein, 17 aa, Artificial Sequence
  Synthetically generated peptide
  VARIANT (1)..(17): Xaa = Any Amino Acid
CCEXFXCCXNPACTXGC

SEQ ID NO: 5167 - protein, 17 aa, Artificial Sequence
  Synthetically generated peptide
  VARIANT (1)..(17): Xaa = Any Amino Acid
CCEXFXCCXNPACTGXC

SEQ ID NO: 5168 - protein, 16 aa, Artificial Sequence
  Synthetically generated peptide
  VARIANT (1)..(16): Xaa = Any Amino Acid
CCEXFXCCNXPACTGC

SEQ ID NO: 5169 - protein, 17 aa, Artificial Sequence
  Synthetically generated peptide
  VARIANT (1)..(17): Xaa = Any Amino Acid
CCEXFXCCNXXPACTGC

SEQ ID NO: 5170 - protein, 17 aa, Artificial Sequence
  Synthetically generated peptide
  VARIANT (1)..(17): Xaa = Any Amino Acid
CCEXFXCCNXPXACTGC

SEQ ID NO: 5171 - protein, 17 aa, Artificial Sequence
  Synthetically generated peptide
  VARIANT (1)..(17): Xaa = Any Amino Acid
CCEXFXCCNXPAXCTGC

SEQ ID NO: 5172 - protein, 17 aa, Artificial Sequence
  Synthetically generated peptide
  VARIANT (1)..(17): Xaa = Any Amino Acid
CCEXFXCCNXPACXTGC

SEQ ID NO: 5173 - protein, 17 aa, Artificial Sequence
  Synthetically generated peptide
  VARIANT (1)..(17): Xaa = Any Amino Acid
CCEXFXCCNXPACTXGC

SEQ ID NO: 5174 - protein, 17 aa, Artificial Sequence
  Synthetically generated peptide
  VARIANT (1)..(17): Xaa = Any Amino Acid
CCEXFXCCNXPACTGXC

SEQ ID NO: 5175 - protein, 16 aa, Artificial Sequence
  Synthetically generated peptide
  VARIANT (1)..(16): Xaa = Any Amino Acid
CCEXFXCCNPXACTGC

SEQ ID NO: 5176 - protein, 17 aa, Artificial Sequence
  Synthetically generated peptide
  VARIANT (1)..(17): Xaa = Any Amino Acid
CCEXFXCCNPXXACTGC

SEQ ID NO: 5177 - protein, 17 aa, Artificial Sequence
  Synthetically generated peptide
  VARIANT (1)..(17): Xaa = Any Amino Acid
CCEXFXCCNPXAXCTGC

SEQ ID NO: 5178 - protein, 17 aa, Artificial Sequence
  Synthetically generated peptide
  VARIANT (1)..(17): Xaa = Any Amino Acid
CCEXFXCCNPXACXTGC

SEQ ID NO: 5179 - protein, 17 aa, Artificial Sequence
  Synthetically generated peptide
  VARIANT (1)..(17): Xaa = Any Amino Acid
CCEXFXCCNPXACTXGC

SEQ ID NO: 5180 - protein, 17 aa, Artificial Sequence
  Synthetically generated peptide
  VARIANT (1)..(17): Xaa = Any Amino Acid
CCEXFXCCNPXACTGXC

SEQ ID NO: 5181 - protein, 16 aa, Artificial Sequence
  Synthetically generated peptide
  VARIANT (1)..(16): Xaa = Any Amino Acid
CCEXFXCCNPAXCTGC

SEQ ID NO: 5182 - protein, 17 aa, Artificial Sequence
  Synthetically generated peptide
  VARIANT (1)..(17): Xaa = Any Amino Acid
CCEXFXCCNPAXXCTGC

SEQ ID NO: 5183 - protein, 17 aa, Artificial Sequence
  Synthetically generated peptide
  VARIANT (1)..(17): Xaa = Any Amino Acid
CCEXFXCCNPAXCXTGC

SEQ ID NO: 5184 - protein, 17 aa, Artificial Sequence
  Synthetically generated peptide
  VARIANT (1)..(17): Xaa = Any Amino Acid
CCEXFXCCNPAXCTXGC

SEQ ID NO: 5185 - protein, 17 aa, Artificial Sequence
  Synthetically generated peptide
  VARIANT (1)..(17): Xaa = Any Amino Acid
CCEXFXCCNPAXCTGXC

SEQ ID NO: 5186 - protein, 16 aa, Artificial Sequence
  Synthetically generated peptide
  VARIANT (1)..(16): Xaa = Any Amino Acid
CCEXFXCCNPACXTGC

SEQ ID NO: 5187 - protein, 17 aa, Artificial Sequence
  Synthetically generated peptide
  VARIANT (1)..(17): Xaa = Any Amino Acid
CCEXFXCCNPACXXTGC

SEQ ID NO: 5188 - protein, 17 aa, Artificial Sequence
  Synthetically generated peptide
  VARIANT (1)..(17): Xaa = Any Amino Acid
CCEXFXCCNPACXTXGC

SEQ ID NO: 5189 - protein, 17 aa, Artificial Sequence
  Synthetically generated peptide
  VARIANT (1)..(17): Xaa = Any Amino Acid
CCEXFXCCNPACXTGXC

SEQ ID NO: 5190 - protein, 16 aa, Artificial Sequence
  Synthetically generated peptide
  VARIANT (1)..(16): Xaa = Any Amino Acid
CCEXFXCCNPACTXGC

SEQ ID NO: 5191 - protein, 17 aa, Artificial Sequence
  Synthetically generated peptide
  VARIANT (1)..(17): Xaa = Any Amino Acid
CCEXFXCCNPACTXXGC

SEQ ID NO: 5192 - protein, 17 aa, Artificial Sequence
  Synthetically generated peptide
  VARIANT (1)..(17): Xaa = Any Amino Acid
CCEXFXCCNPACTXGXC

SEQ ID NO: 5193 - protein, 16 aa, Artificial Sequence
  Synthetically generated peptide
  VARIANT (1)..(16): Xaa = Any Amino Acid
CCEXFXCCNPACTGXC

SEQ ID NO: 5194 - protein, 17 aa, Artificial Sequence
  Synthetically generated peptide
  VARIANT (1)..(17): Xaa = Any Amino Acid
CCEXFXCCNPACTGXXC

SEQ ID NO: 5195 - protein, 15 aa, Artificial Sequence
  Synthetically generated peptide
  VARIANT (1)..(15): Xaa = Any Amino Acid
CCEXFCCXNPACTGC

SEQ ID NO: 5196 - protein, 16 aa, Artificial Sequence
  Synthetically generated peptide
  VARIANT (1)..(16): Xaa = Any Amino Acid
CCEXFCCXXNPACTGC

SEQ ID NO: 5197 - protein, 17 aa, Artificial Sequence
  Synthetically generated peptide
  VARIANT (1)..(17): Xaa = Any Amino Acid
CCEXFCCXXXNPACTGC

SEQ ID NO: 5198 - protein, 17 aa, Artificial Sequence
  Synthetically generated peptide
  VARIANT (1)..(17): Xaa = Any Amino Acid
CCEXFCCXXNXPACTGC

SEQ ID NO: 5199 - protein, 17 aa, Artificial Sequence
  Synthetically generated peptide
  VARIANT (1)..(17): Xaa = Any Amino Acid
CCEXFCCXXNPXACTGC

SEQ ID NO: 5200 - protein, 17 aa, Artificial Sequence
  Synthetically generated peptide
  VARIANT (1)..(17): Xaa = Any Amino Acid
CCEXFCCXXNPAXCTGC

SEQ ID NO: 5201 - protein, 17 aa, Artificial Sequence
  Synthetically generated peptide
  VARIANT (1)..(17): Xaa = Any Amino Acid
CCEXFCCXXNPACXTGC

SEQ ID NO: 5202 - protein, 17 aa, Artificial Sequence
  Synthetically generated peptide
  VARIANT (1)..(17): Xaa = Any Amino Acid
CCEXFCCXXNPACTXGC

SEQ ID NO: 5203 - protein, 17 aa, Artificial Sequence
  Synthetically generated peptide
  VARIANT (1)..(17): Xaa = Any Amino Acid
CCEXFCCXXNPACTGXC

SEQ ID NO: 5204 - protein, 16 aa, Artificial Sequence
  Synthetically generated peptide
  VARIANT (1)..(16): Xaa = Any Amino Acid
CCEXFCCXNXPACTGC

SEQ ID NO: 5205 - protein, 17 aa, Artificial Sequence
  Synthetically generated peptide
  VARIANT (1)..(17): Xaa = Any Amino Acid
CCEXFCCXNXXPACTGC

SEQ ID NO: 5206 - protein, 17 aa, Artificial Sequence
  Synthetically generated peptide
  VARIANT (1)..(17): Xaa = Any Amino Acid
CCEXFCCXNXPXACTGC

SEQ ID NO: 5207 - protein, 17 aa, Artificial Sequence
  Synthetically generated peptide
  VARIANT (1)..(17): Xaa = Any Amino Acid
CCEXFCCXNXPAXCTGC

SEQ ID NO: 5208 - protein, 17 aa, Artificial Sequence
  Synthetically generated peptide
  VARIANT (1)..(17): Xaa = Any Amino Acid
CCEXFCCXNXPACXTGC

SEQ ID NO: 5209 - protein, 17 aa, Artificial Sequence
  Synthetically generated peptide
  VARIANT (1)..(17): Xaa = Any Amino Acid
CCEXFCCXNXPACTXGC

SEQ ID NO: 5210 - protein, 17 aa, Artificial Sequence
  Synthetically generated peptide
  VARIANT (1)..(17): Xaa = Any Amino Acid
CCEXFCCXNXPACTGXC

SEQ ID NO: 5211 - protein, 16 aa, Artificial Sequence
  Synthetically generated peptide
  VARIANT (1)..(16): Xaa = Any Amino Acid
CCEXFCCXNPXACTGC

SEQ ID NO: 5212 - protein, 17 aa, Artificial Sequence
  Synthetically generated peptide
  VARIANT (1)..(17): Xaa = Any Amino Acid
CCEXFCCXNPXXACTGC

SEQ ID NO: 5213 - protein, 17 aa, Artificial Sequence
  Synthetically generated peptide
  VARIANT (1)..(17): Xaa = Any Amino Acid
CCEXFCCXNPXAXCTGC

SEQ ID NO: 5214 - protein, 17 aa, Artificial Sequence
  Synthetically generated peptide
  VARIANT (1)..(17): Xaa = Any Amino Acid
CCEXFCCXNPXACXTGC

SEQ ID NO: 5215 - protein, 17 aa, Artificial Sequence
  Synthetically generated peptide
  VARIANT (1)..(17): Xaa = Any Amino Acid
CCEXFCCXNPXACTXGC

SEQ ID NO: 5216 - protein, 17 aa, Artificial Sequence
  Synthetically generated peptide
  VARIANT (1)..(17): Xaa = Any Amino Acid
CCEXFCCXNPXACTGXC

SEQ ID NO: 5217 - protein, 16 aa, Artificial Sequence
  Synthetically generated peptide
  VARIANT (1)..(16): Xaa = Any Amino Acid
CCEXFCCXNPAXCTGC

SEQ ID NO: 5218 - protein, 17 aa, Artificial Sequence
  Synthetically generated peptide
  VARIANT (1)..(17): Xaa = Any Amino Acid
CCEXFCCXNPAXXCTGC

SEQ ID NO: 5219 - protein, 17 aa, Artificial Sequence
  Synthetically generated peptide
  VARIANT (1)..(17): Xaa = Any Amino Acid
CCEXFCCXNPAXCXTGC

SEQ ID NO: 5220 - protein, 17 aa, Artificial Sequence
  Synthetically generated peptide
  VARIANT (1)..(17): Xaa = Any Amino Acid
CCEXFCCXNPAXCTXGC

SEQ ID NO: 5221 - protein, 17 aa, Artificial Sequence
  Synthetically generated peptide
  VARIANT (1)..(17): Xaa = Any Amino Acid
CCEXFCCXNPAXCTGXC

SEQ ID NO: 5222 - protein, 16 aa, Artificial Sequence
  Synthetically generated peptide
  VARIANT (1)..(16): Xaa = Any Amino Acid
CCEXFCCXNPACXTGC

SEQ ID NO: 5223 - protein, 17 aa, Artificial Sequence
  Synthetically generated peptide
  VARIANT (1)..(17): Xaa = Any Amino Acid
CCEXFCCXNPACXXTGC

SEQ ID NO: 5224 - protein, 17 aa, Artificial Sequence
  Synthetically generated peptide
  VARIANT (1)..(17): Xaa = Any Amino Acid
CCEXFCCXNPACXTXGC

SEQ ID NO: 5225 - protein, 17 aa, Artificial Sequence
  Synthetically generated peptide
  VARIANT (1)..(17): Xaa = Any Amino Acid
CCEXFCCXNPACXTGXC

SEQ ID NO: 5226 - protein, 16 aa, Artificial Sequence
  Synthetically generated peptide
  VARIANT (1)..(16): Xaa = Any Amino Acid
CCEXFCCXNPACTXGC

SEQ ID NO: 5227 - protein, 17 aa, Artificial Sequence
  Synthetically generated peptide
  VARIANT (1)..(17): Xaa = Any Amino Acid
CCEXFCCXNPACTXXGC

SEQ ID NO: 5228 - protein, 17 aa, Artificial Sequence
  Synthetically generated peptide
  VARIANT (1)..(17): Xaa = Any Amino Acid
CCEXFCCXNPACTXGXC

SEQ ID NO: 5229 - protein, 16 aa, Artificial Sequence
  Synthetically generated peptide
  VARIANT (1)..(16): Xaa = Any Amino Acid
CCEXFCCXNPACTGXC

SEQ ID NO: 5230 - protein, 17 aa, Artificial Sequence
  Synthetically generated peptide
  VARIANT (1)..(17): Xaa = Any Amino Acid
CCEXFCCXNPACTGXXC

SEQ ID NO: 5231 - protein, 15 aa, Artificial Sequence
  Synthetically generated peptide
  VARIANT (1)..(15): Xaa = Any Amino Acid
CCEXFCCNXPACTGC

SEQ ID NO: 5232 - protein, 16 aa, Artificial Sequence
  Synthetically generated peptide
  VARIANT (1)..(16): Xaa = Any Amino Acid
CCEXFCCNXXPACTGC

SEQ ID NO: 5233 - protein, 17 aa, Artificial Sequence
  Synthetically generated peptide
  VARIANT (1)..(17): Xaa = Any Amino Acid
CCEXFCCNXXXPACTGC

SEQ ID NO: 5234 - protein, 17 aa, Artificial Sequence
  Synthetically generated peptide
  VARIANT (1)..(17): Xaa = Any Amino Acid
CCEXFCCNXXPXACTGC

SEQ ID NO: 5235 - protein, 17 aa, Artificial Sequence
  Synthetically generated peptide
  VARIANT (1)..(17): Xaa = Any Amino Acid
CCEXFCCNXXPAXCTGC

SEQ ID NO: 5236 - protein, 17 aa, Artificial Sequence
  Synthetically generated peptide
  VARIANT (1)..(17): Xaa = Any Amino Acid
CCEXFCCNXXPACXTGC

SEQ ID NO: 5237 - protein, 17 aa, Artificial Sequence
  Synthetically generated peptide
  VARIANT (1)..(17): Xaa = Any Amino Acid
CCEXFCCNXXPACTXGC

SEQ ID NO: 5238 - protein, 17 aa, Artificial Sequence
  Synthetically generated peptide
  VARIANT (1)..(17): Xaa = Any Amino Acid
CCEXFCCNXXPACTGXC

SEQ ID NO: 5239 - protein, 16 aa, Artificial Sequence
  Synthetically generated peptide
  VARIANT (1)..(16): Xaa = Any Amino Acid
CCEXFCCNXPXACTGC

SEQ ID NO: 5240 - protein, 17 aa, Artificial Sequence
  Synthetically generated peptide
  VARIANT (1)..(17): Xaa = Any Amino Acid
CCEXFCCNXPXXACTGC

SEQ ID NO: 5241 - protein, 17 aa, Artificial Sequence
  Synthetically generated peptide
  VARIANT (1)..(17): Xaa = Any Amino Acid
CCEXFCCNXPXAXCTGC

SEQ ID NO: 5242 - protein, 17 aa, Artificial Sequence
  Synthetically generated peptide
  VARIANT (1)..(17): Xaa = Any Amino Acid
CCEXFCCNXPXACXTGC

SEQ ID NO: 5243 - protein, 17 aa, Artificial Sequence
  Synthetically generated peptide
  VARIANT (1)..(17): Xaa = Any Amino Acid
CCEXFCCNXPXACTXGC

SEQ ID NO: 5244 - protein, 17 aa, Artificial Sequence
  Synthetically generated peptide
  VARIANT (1)..(17): Xaa = Any Amino Acid
CCEXFCCNXPXACTGXC

SEQ ID NO: 5245 - protein, 16 aa, Artificial Sequence
  Synthetically generated peptide
  VARIANT (1)..(16): Xaa = Any Amino Acid
CCEXFCCNXPAXCTGC

SEQ ID NO: 5246 - protein, 17 aa, Artificial Sequence
  Synthetically generated peptide
  VARIANT (1)..(17): Xaa = Any Amino Acid
CCEXFCCNXPAXXCTGC

SEQ ID NO: 5247 - protein, 17 aa, Artificial Sequence
  Synthetically generated peptide
  VARIANT (1)..(17): Xaa = Any Amino Acid
CCEXFCCNXPAXCXTGC

SEQ ID NO: 5248 - protein, 17 aa, Artificial Sequence
  Synthetically generated peptide
  VARIANT (1)..(17): Xaa = Any Amino Acid
CCEXFCCNXPAXCTXGC

SEQ ID NO: 5249 - protein, 17 aa, Artificial Sequence
  Synthetically generated peptide
  VARIANT (1)..(17): Xaa = Any Amino Acid
CCEXFCCNXPAXCTGXC

SEQ ID NO: 5250 - protein, 16 aa, Artificial Sequence
  Synthetically generated peptide
  VARIANT (1)..(16): Xaa = Any Amino Acid
CCEXFCCNXPACXTGC

SEQ ID NO: 5251 - protein, 17 aa, Artificial Sequence
  Synthetically generated peptide
  VARIANT (1)..(17): Xaa = Any Amino Acid
CCEXFCCNXPACXXTGC

SEQ ID NO: 5252 - protein, 17 aa, Artificial Sequence
  Synthetically generated peptide
  VARIANT (1)..(17): Xaa = Any Amino Acid
CCEXFCCNXPACXTXGC

SEQ ID NO: 5253 - protein, 17 aa, Artificial Sequence
  Synthetically generated peptide
  VARIANT (1)..(17): Xaa = Any Amino Acid
CCEXFCCNXPACXTGXC

SEQ ID NO: 5254 - protein, 16 aa, Artificial Sequence
  Synthetically generated peptide
  VARIANT (1)..(16): Xaa = Any Amino Acid
CCEXFCCNXPACTXGC

SEQ ID NO: 5255 - protein, 17 aa, Artificial Sequence
  Synthetically generated peptide
  VARIANT (1)..(17): Xaa = Any Amino Acid
CCEXFCCNXPACTXXGC

SEQ ID NO: 5256 - protein, 17 aa, Artificial Sequence
  Synthetically generated peptide
  VARIANT (1)..(17): Xaa = Any Amino Acid
CCEXFCCNXPACTXGXC

SEQ ID NO: 5257 - protein, 16 aa, Artificial Sequence
  Synthetically generated peptide
  VARIANT (1)..(16): Xaa = Any Amino Acid
CCEXFCCNXPACTGXC

SEQ ID NO: 5258 - protein, 17 aa, Artificial Sequence
  Synthetically generated peptide
  VARIANT (1)..(17): Xaa = Any Amino Acid
CCEXFCCNXPACTGXXC

SEQ ID NO: 5259 - protein, 15 aa, Artificial Sequence
  Synthetically generated peptide
  VARIANT (1)..(15): Xaa = Any Amino Acid
CCEXFCCNPXACTGC

SEQ ID NO: 5260 - protein, 16 aa, Artificial Sequence
  Synthetically generated peptide
  VARIANT (1)..(16): Xaa = Any Amino Acid
CCEXFCCNPXXACTGC

SEQ ID NO: 5261 - protein, 17 aa, Artificial Sequence
  Synthetically generated peptide
  VARIANT (1)..(17): Xaa = Any Amino Acid
CCEXFCCNPXXXACTGC

SEQ ID NO: 5262 - protein, 17 aa, Artificial Sequence
  Synthetically generated peptide
  VARIANT (1)..(17): Xaa = Any Amino Acid
CCEXFCCNPXXAXCTGC

SEQ ID NO: 5263 - protein, 17 aa, Artificial Sequence
  Synthetically generated peptide
  VARIANT (1)..(17): Xaa = Any Amino Acid
CCEXFCCNPXXACXTGC

SEQ ID NO: 5264 - protein, 17 aa, Artificial Sequence
  Synthetically generated peptide
  VARIANT (1)..(17): Xaa = Any Amino Acid
CCEXFCCNPXXACTXGC

SEQ ID NO: 5265 - protein, 17 aa, Artificial Sequence
  Synthetically generated peptide
  VARIANT (1)..(17): Xaa = Any Amino Acid
CCEXFCCNPXXACTGXC

SEQ ID NO: 5266 - protein, 16 aa, Artificial Sequence
  Synthetically generated peptide
  VARIANT (1)..(16): Xaa = Any Amino Acid
CCEXFCCNPXAXCTGC

SEQ ID NO: 5267 - protein, 17 aa, Artificial Sequence
  Synthetically generated peptide
  VARIANT (1)..(17): Xaa = Any Amino Acid
CCEXFCCNPXAXXCTGC

SEQ ID NO: 5268 - protein, 17 aa, Artificial Sequence
  Synthetically generated peptide
  VARIANT (1)..(17): Xaa = Any Amino Acid
CCEXFCCNPXAXCXTGC

SEQ ID NO: 5269 - protein, 17 aa, Artificial Sequence
  Synthetically generated peptide
  VARIANT (1)..(17): Xaa = Any Amino Acid
CCEXFCCNPXAXCTXGC

SEQ ID NO: 5270 - protein, 17 aa, Artificial Sequence
  Synthetically generated peptide
  VARIANT (1)..(17): Xaa = Any Amino Acid
CCEXFCCNPXAXCTGXC

SEQ ID NO: 5271 - protein, 16 aa, Artificial Sequence
  Synthetically generated peptide
  VARIANT (1)..(16): Xaa = Any Amino Acid
CCEXFCCNPXACXTGC

SEQ ID NO: 5272 - protein, 17 aa, Artificial Sequence
  Synthetically generated peptide
  VARIANT (1)..(17): Xaa = Any Amino Acid
CCEXFCCNPXACXXTGC

SEQ ID NO: 5273 - protein, 17 aa, Artificial Sequence
  Synthetically generated peptide
  VARIANT (1)..(17): Xaa = Any Amino Acid
CCEXFCCNPXACXTXGC

SEQ ID NO: 5274 - protein, 17 aa, Artificial Sequence
  Synthetically generated peptide
  VARIANT (1)..(17): Xaa = Any Amino Acid
CCEXFCCNPXACXTGXC

SEQ ID NO: 5275 - protein, 16 aa, Artificial Sequence
  Synthetically generated peptide
  VARIANT (1)..(16): Xaa = Any Amino Acid
CCEXFCCNPXACTXGC

SEQ ID NO: 5276 - protein, 17 aa, Artificial Sequence
  Synthetically generated peptide
  VARIANT (1)..(17): Xaa = Any Amino Acid
CCEXFCCNPXACTXXGC

SEQ ID NO: 5277 - protein, 17 aa, Artificial Sequence
  Synthetically generated peptide
  VARIANT (1)..(17): Xaa = Any Amino Acid
CCEXFCCNPXACTXGXC

SEQ ID NO: 5278 - protein, 16 aa, Artificial Sequence
  Synthetically generated peptide
  VARIANT (1)..(16): Xaa = Any Amino Acid
CCEXFCCNPXACTGXC

SEQ ID NO: 5279 - protein, 17 aa, Artificial Sequence
  Synthetically generated peptide
  VARIANT (1)..(17): Xaa = Any Amino Acid
CCEXFCCNPXACTGXXC

SEQ ID NO: 5280 - protein, 15 aa, Artificial Sequence
  Synthetically generated peptide
  VARIANT (1)..(15): Xaa = Any Amino Acid
CCEXFCCNPAXCTGC

SEQ ID NO: 5281 - protein, 16 aa, Artificial Sequence
  Synthetically generated peptide
  VARIANT (1)..(16): Xaa = Any Amino Acid
CCEXFCCNPAXXCTGC

SEQ ID NO: 5282 - protein, 17 aa, Artificial Sequence
  Synthetically generated peptide
  VARIANT (1)..(17): Xaa = Any Amino Acid
CCEXFCCNPAXXXCTGC

SEQ ID NO: 5283 - protein, 17 aa, Artificial Sequence
  Synthetically generated peptide
  VARIANT (1)..(17): Xaa = Any Amino Acid
CCEXFCCNPAXXCXTGC

SEQ ID NO: 5284 - protein, 17 aa, Artificial Sequence
  Synthetically generated peptide
  VARIANT (1)..(17): Xaa = Any Amino Acid
CCEXFCCNPAXXCTXGC

SEQ ID NO: 5285 - protein, 17 aa, Artificial Sequence
  Synthetically generated peptide
  VARIANT (1)..(17): Xaa = Any Amino Acid
CCEXFCCNPAXXCTGXC

SEQ ID NO: 5286 - protein, 16 aa, Artificial Sequence
  Synthetically generated peptide
  VARIANT (1)..(16): Xaa = Any Amino Acid
CCEXFCCNPAXCXTGC

SEQ ID NO: 5287 - protein, 17 aa, Artificial Sequence
  Synthetically generated peptide
  VARIANT (1)..(17): Xaa = Any Amino Acid
CCEXFCCNPAXCXXTGC

SEQ ID NO: 5288 - protein, 17 aa, Artificial Sequence
  Synthetically generated peptide
  VARIANT (1)..(17): Xaa = Any Amino Acid
CCEXFCCNPAXCXTXGC

SEQ ID NO: 5289 - protein, 17 aa, Artificial Sequence
  Synthetically generated peptide
  VARIANT (1)..(17): Xaa = Any Amino Acid
CCEXFCCNPAXCXTGXC

SEQ ID NO: 5290 - protein, 16 aa, Artificial Sequence
  Synthetically generated peptide
  VARIANT (1)..(16): Xaa = Any Amino Acid
CCEXFCCNPAXCTXGC

SEQ ID NO: 5291 - protein, 17 aa, Artificial Sequence
  Synthetically generated peptide
  VARIANT (1)..(17): Xaa = Any Amino Acid
CCEXFCCNPAXCTXXGC

SEQ ID NO: 5292 - protein, 17 aa, Artificial Sequence
  Synthetically generated peptide
  VARIANT (1)..(17): Xaa = Any Amino Acid
CCEXFCCNPAXCTXGXC

SEQ ID NO: 5293 - protein, 16 aa, Artificial Sequence
  Synthetically generated peptide
  VARIANT (1)..(16): Xaa = Any Amino Acid
CCEXFCCNPAXCTGXC

SEQ ID NO: 5294 - protein, 17 aa, Artificial Sequence
  Synthetically generated peptide
  VARIANT (1)..(17): Xaa = Any Amino Acid
CCEXFCCNPAXCTGXXC

SEQ ID NO: 5295 - protein, 15 aa, Artificial Sequence
  Synthetically generated peptide
  VARIANT (1)..(15): Xaa = Any Amino Acid
CCEXFCCNPACXTGC

SEQ ID NO: 5296 - protein, 16 aa, Artificial Sequence
  Synthetically generated peptide
  VARIANT (1)..(16): Xaa = Any Amino Acid
CCEXFCCNPACXXTGC

SEQ ID NO: 5297 - protein, 17 aa, Artificial Sequence
  Synthetically generated peptide
  VARIANT (1)..(17): Xaa = Any Amino Acid
CCEXFCCNPACXXXTGC

SEQ ID NO: 5298 - protein, 17 aa, Artificial Sequence
  Synthetically generated peptide
  VARIANT (1)..(17): Xaa = Any Amino Acid
CCEXFCCNPACXXTXGC

SEQ ID NO: 5299 - protein, 17 aa, Artificial Sequence
  Synthetically generated peptide
  VARIANT (1)..(17): Xaa = Any Amino Acid
CCEXFCCNPACXXTGXC

SEQ ID NO: 5300 - protein, 16 aa, Artificial Sequence
  Synthetically generated peptide
  VARIANT (1)..(16): Xaa = Any Amino Acid
CCEXFCCNPACXTXGC

SEQ ID NO: 5301 - protein, 17 aa, Artificial Sequence
  Synthetically generated peptide
  VARIANT (1)..(17): Xaa = Any Amino Acid
CCEXFCCNPACXTXXGC

SEQ ID NO: 5302 - protein, 17 aa, Artificial Sequence
  Synthetically generated peptide
  VARIANT (1)..(17): Xaa = Any Amino Acid
CCEXFCCNPACXTXGXC

SEQ ID NO: 5303 - protein, 16 aa, Artificial Sequence
  Synthetically generated peptide
  VARIANT (1)..(16): Xaa = Any Amino Acid
CCEXFCCNPACXTGXC

SEQ ID NO: 5304 - protein, 17 aa, Artificial Sequence
  Synthetically generated peptide
  VARIANT (1)..(17): Xaa = Any Amino Acid
CCEXFCCNPACXTGXXC

SEQ ID NO: 5305 - protein, 15 aa, Artificial Sequence
  Synthetically generated peptide
  VARIANT (1)..(15): Xaa = Any Amino Acid
CCEXFCCNPACTXGC

SEQ ID NO: 5306 - protein, 16 aa, Artificial Sequence
  Synthetically generated peptide
  VARIANT (1)..(16): Xaa = Any Amino Acid
CCEXFCCNPACTXXGC

SEQ ID NO: 5307 - protein, 17 aa, Artificial Sequence
  Synthetically generated peptide
  VARIANT (1)..(17): Xaa = Any Amino Acid
CCEXFCCNPACTXXXGC

SEQ ID NO: 5308 - protein, 17 aa, Artificial Sequence
  Synthetically generated peptide
  VARIANT (1)..(17): Xaa = Any Amino Acid
CCEXFCCNPACTXXGXC

SEQ ID NO: 5309 - protein, 16 aa, Artificial Sequence
  Synthetically generated peptide
  VARIANT (1)..(16): Xaa = Any Amino Acid
CCEXFCCNPACTXGXC

SEQ ID NO: 5310 - protein, 17 aa, Artificial Sequence
  Synthetically generated peptide
  VARIANT (1)..(17): Xaa = Any Amino Acid
CCEXFCCNPACTXGXXC

SEQ ID NO: 5311 - protein, 15 aa, Artificial Sequence
  Synthetically generated peptide
  VARIANT (1)..(15): Xaa = Any Amino Acid
CCEXFCCNPACTGXC

SEQ ID NO: 5312 - protein, 16 aa, Artificial Sequence
  Synthetically generated peptide
  VARIANT (1)..(16): Xaa = Any Amino Acid
CCEXFCCNPACTGXXC

SEQ ID NO: 5313 - protein, 17 aa, Artificial Sequence
  Synthetically generated peptide
  VARIANT (1)..(17): Xaa = Any Amino Acid
CCEXFCCNPACTGXXXC

SEQ ID NO: 5314 - protein, 14 aa, Artificial Sequence
  Synthetically generated peptide
  VARIANT (1)..(14): Xaa = Any Amino Acid
CCEFXCCNPACTGC

SEQ ID NO: 5315 - protein, 15 aa, Artificial Sequence
  Synthetically generated peptide
  VARIANT (1)..(15): Xaa = Any Amino Acid
CCEFXXCCNPACTGC

SEQ ID NO: 5316 - protein, 16 aa, Artificial Sequence
  Synthetically generated peptide
  VARIANT (1)..(16): Xaa = Any Amino Acid
CCEFXXXCCNPACTGC

SEQ ID NO: 5317 - protein, 17 aa, Artificial Sequence
  Synthetically generated peptide
  VARIANT (1)..(17): Xaa = Any Amino Acid
CCEFXXXXCCNPACTGC

SEQ ID NO: 5318 - protein, 17 aa, Artificial Sequence
  Synthetically generated peptide
  VARIANT (1)..(17): Xaa = Any Amino Acid
CCEFXXXCCXNPACTGC

SEQ ID NO: 5319 - protein, 17 aa, Artificial Sequence
  Synthetically generated peptide
  VARIANT (1)..(17): Xaa = Any Amino Acid
CCEFXXXCCNXPACTGC

SEQ ID NO: 5320 - protein, 17 aa, Artificial Sequence
  Synthetically generated peptide
  VARIANT (1)..(17): Xaa = Any Amino Acid
CCEFXXXCCNPXACTGC

SEQ ID NO: 5321 - protein, 17 aa, Artificial Sequence
  Synthetically generated peptide
  VARIANT (1)..(17): Xaa = Any Amino Acid
CCEFXXXCCNPAXCTGC

SEQ ID NO: 5322 - protein, 17 aa, Artificial Sequence
  Synthetically generated peptide
  VARIANT (1)..(17): Xaa = Any Amino Acid
CCEFXXXCCNPACXTGC

SEQ ID NO: 5323 - protein, 17 aa, Artificial Sequence
  Synthetically generated peptide
  VARIANT (1)..(17): Xaa = Any Amino Acid
CCEFXXXCCNPACTXGC

SEQ ID NO: 5324 - protein, 17 aa, Artificial Sequence
  Synthetically generated peptide
  VARIANT (1)..(17): Xaa = Any Amino Acid
CCEFXXXCCNPACTGXC

SEQ ID NO: 5325 - protein, 16 aa, Artificial Sequence
  Synthetically generated peptide
  VARIANT (1)..(16): Xaa = Any Amino Acid
CCEFXXCCXNPACTGC

SEQ ID NO: 5326 - protein, 17 aa, Artificial Sequence
  Synthetically generated peptide
  VARIANT (1)..(17): Xaa = Any Amino Acid
CCEFXXCCXXNPACTGC

SEQ ID NO: 5327 - protein, 17 aa, Artificial Sequence
  Synthetically generated peptide
  VARIANT (1)..(17): Xaa = Any Amino Acid
CCEFXXCCXNXPACTGC

SEQ ID NO: 5328 - protein, 17 aa, Artificial Sequence
  Synthetically generated peptide
  VARIANT (1)..(17): Xaa = Any Amino Acid
CCEFXXCCXNPXACTGC

SEQ ID NO: 5329 - protein, 17 aa, Artificial Sequence
  Synthetically generated peptide
  VARIANT (1)..(17): Xaa = Any Amino Acid
CCEFXXCCXNPAXCTGC

SEQ ID NO: 5330 - protein, 17 aa, Artificial Sequence
  Synthetically generated peptide
  VARIANT (1)..(17): Xaa = Any Amino Acid
CCEFXXCCXNPACXTGC

SEQ ID NO: 5331 - protein, 17 aa, Artificial Sequence
  Synthetically generated peptide
  VARIANT (1)..(17): Xaa = Any Amino Acid
CCEFXXCCXNPACTXGC

SEQ ID NO: 5332 - protein, 17 aa, Artificial Sequence
  Synthetically generated peptide
  VARIANT (1)..(17): Xaa = Any Amino Acid
CCEFXXCCXNPACTGXC

SEQ ID NO: 5333 - protein, 16 aa, Artificial Sequence
  Synthetically generated peptide
  VARIANT (1)..(16): Xaa = Any Amino Acid
CCEFXXCCNXPACTGC

SEQ ID NO: 5334 - protein, 17 aa, Artificial Sequence
  Synthetically generated peptide
  VARIANT (1)..(17): Xaa = Any Amino Acid
CCEFXXCCNXXPACTGC

SEQ ID NO: 5335 - protein, 17 aa, Artificial Sequence
  Synthetically generated peptide
  VARIANT (1)..(17): Xaa = Any Amino Acid
CCEFXXCCNXPXACTGC

SEQ ID NO: 5336 - protein, 17 aa, Artificial Sequence
  Synthetically generated peptide
  VARIANT (1)..(17): Xaa = Any Amino Acid
CCEFXXCCNXPAXCTGC

SEQ ID NO: 5337 - protein, 17 aa, Artificial Sequence
  Synthetically generated peptide
  VARIANT (1)..(17): Xaa = Any Amino Acid
CCEFXXCCNXPACXTGC

SEQ ID NO: 5338 - protein, 17 aa, Artificial Sequence
  Synthetically generated peptide
  VARIANT (1)..(17): Xaa = Any Amino Acid
CCEFXXCCNXPACTXGC

SEQ ID NO: 5339 - protein, 17 aa, Artificial Sequence
  Synthetically generated peptide
  VARIANT (1)..(17): Xaa = Any Amino Acid
CCEFXXCCNXPACTGXC

SEQ ID NO: 5340 - protein, 16 aa, Artificial Sequence
  Synthetically generated peptide
  VARIANT (1)..(16): Xaa = Any Amino Acid
CCEFXXCCNPXACTGC

SEQ ID NO: 5341 - protein, 17 aa, Artificial Sequence
  Synthetically generated peptide
  VARIANT (1)..(17): Xaa = Any Amino Acid
CCEFXXCCNPXXACTGC

SEQ ID NO: 5342 - protein, 17 aa, Artificial Sequence
  Synthetically generated peptide
  VARIANT (1)..(17): Xaa = Any Amino Acid
CCEFXXCCNPXAXCTGC

SEQ ID NO: 5343 - protein, 17 aa, Artificial Sequence
  Synthetically generated peptide
  VARIANT (1)..(17): Xaa = Any Amino Acid
CCEFXXCCNPXACXTGC

SEQ ID NO: 5344 - protein, 17 aa, Artificial Sequence
  Synthetically generated peptide
  VARIANT (1)..(17): Xaa = Any Amino Acid
CCEFXXCCNPXACTXGC

SEQ ID NO: 5345 - protein, 17 aa, Artificial Sequence
  Synthetically generated peptide
  VARIANT (1)..(17): Xaa = Any Amino Acid
CCEFXXCCNPXACTGXC

SEQ ID NO: 5346 - protein, 16 aa, Artificial Sequence
  Synthetically generated peptide
  VARIANT (1)..(16): Xaa = Any Amino Acid
CCEFXXCCNPAXCTGC

SEQ ID NO: 5347 - protein, 17 aa, Artificial Sequence
  Synthetically generated peptide
  VARIANT (1)..(17): Xaa = Any Amino Acid
CCEFXXCCNPAXXCTGC

SEQ ID NO: 5348 - protein, 17 aa, Artificial Sequence
  Synthetically generated peptide
  VARIANT (1)..(17): Xaa = Any Amino Acid
CCEFXXCCNPAXCXTGC

SEQ ID NO: 5349 - protein, 17 aa, Artificial Sequence
  Synthetically generated peptide
  VARIANT (1)..(17): Xaa = Any Amino Acid
CCEFXXCCNPAXCTXGC

SEQ ID NO: 5350 - protein, 17 aa, Artificial Sequence
  Synthetically generated peptide
  VARIANT (1)..(17): Xaa = Any Amino Acid
CCEFXXCCNPAXCTGXC

SEQ ID NO: 5351 - protein, 16 aa, Artificial Sequence
  Synthetically generated peptide
  VARIANT (1)..(16): Xaa = Any Amino Acid
CCEFXXCCNPACXTGC

SEQ ID NO: 5352 - protein, 17 aa, Artificial Sequence
  Synthetically generated peptide
  VARIANT (1)..(17): Xaa = Any Amino Acid
CCEFXXCCNPACXXTGC

SEQ ID NO: 5353 - protein, 17 aa, Artificial Sequence
  Synthetically generated peptide
  VARIANT (1)..(17): Xaa = Any Amino Acid
CCEFXXCCNPACXTXGC

SEQ ID NO: 5354 - protein, 17 aa, Artificial Sequence
  Synthetically generated peptide
  VARIANT (1)..(17): Xaa = Any Amino Acid
CCEFXXCCNPACXTGXC

SEQ ID NO: 5355 - protein, 16 aa, Artificial Sequence
  Synthetically generated peptide
  VARIANT (1)..(16): Xaa = Any Amino Acid
CCEFXXCCNPACTXGC

SEQ ID NO: 5356 - protein, 17 aa, Artificial Sequence
  Synthetically generated peptide
  VARIANT (1)..(17): Xaa = Any Amino Acid
CCEFXXCCNPACTXXGC

SEQ ID NO: 5357 - protein, 17 aa, Artificial Sequence
  Synthetically generated peptide
  VARIANT (1)..(17): Xaa = Any Amino Acid
CCEFXXCCNPACTXGXC

SEQ ID NO: 5358 - protein, 16 aa, Artificial Sequence
  Synthetically generated peptide
  VARIANT (1)..(16): Xaa = Any Amino Acid
CCEFXXCCNPACTGXC

SEQ ID NO: 5359 - protein, 17 aa, Artificial Sequence
  Synthetically generated peptide
  VARIANT (1)..(17): Xaa = Any Amino Acid
CCEFXXCCNPACTGXXC

SEQ ID NO: 5360 - protein, 15 aa, Artificial Sequence
  Synthetically generated peptide
  VARIANT (1)..(15): Xaa = Any Amino Acid
CCEFXCCXNPACTGC

SEQ ID NO: 5361 - protein, 16 aa, Artificial Sequence
  Synthetically generated peptide
  VARIANT (1)..(16): Xaa = Any Amino Acid
CCEFXCCXXNPACTGC

SEQ ID NO: 5362 - protein, 17 aa, Artificial Sequence
  Synthetically generated peptide
  VARIANT (1)..(17): Xaa = Any Amino Acid
CCEFXCCXXXNPACTGC

SEQ ID NO: 5363 - protein, 17 aa, Artificial Sequence
  Synthetically generated peptide
  VARIANT (1)..(17): Xaa = Any Amino Acid
CCEFXCCXXNXPACTGC

SEQ ID NO: 5364 - protein, 17 aa, Artificial Sequence
  Synthetically generated peptide
  VARIANT (1)..(17): Xaa = Any Amino Acid
CCEFXCCXXNPXACTGC

SEQ ID NO: 5365 - protein, 17 aa, Artificial Sequence
  Synthetically generated peptide
  VARIANT (1)..(17): Xaa = Any Amino Acid
CCEFXCCXXNPAXCTGC

SEQ ID NO: 5366 - protein, 17 aa, Artificial Sequence
  Synthetically generated peptide
  VARIANT (1)..(17): Xaa = Any Amino Acid
CCEFXCCXXNPACXTGC

SEQ ID NO: 5367 - protein, 17 aa, Artificial Sequence
  Synthetically generated peptide
  VARIANT (1)..(17): Xaa = Any Amino Acid
CCEFXCCXXNPACTXGC

SEQ ID NO: 5368 - protein, 17 aa, Artificial Sequence
  Synthetically generated peptide
  VARIANT (1)..(17): Xaa = Any Amino Acid
CCEFXCCXXNPACTGXC

SEQ ID NO: 5369 - protein, 16 aa, Artificial Sequence
  Synthetically generated peptide
  VARIANT (1)..(16): Xaa = Any Amino Acid
CCEFXCCXNXPACTGC

SEQ ID NO: 5370 - protein, 17 aa, Artificial Sequence
  Synthetically generated peptide
  VARIANT (1)..(17): Xaa = Any Amino Acid
CCEFXCCXNXXPACTGC

SEQ ID NO: 5371 - protein, 17 aa, Artificial Sequence
  Synthetically generated peptide
  VARIANT (1)..(17): Xaa = Any Amino Acid
CCEFXCCXNXPXACTGC

SEQ ID NO: 5372 - protein, 17 aa, Artificial Sequence
  Synthetically generated peptide
  VARIANT (1)..(17): Xaa = Any Amino Acid
CCEFXCCXNXPAXCTGC

SEQ ID NO: 5373 - protein, 17 aa, Artificial Sequence
  Synthetically generated peptide
  VARIANT (1)..(17): Xaa = Any Amino Acid
CCEFXCCXNXPACXTGC

SEQ ID NO: 5374 - protein, 17 aa, Artificial Sequence
  Synthetically generated peptide
  VARIANT (1)..(17): Xaa = Any Amino Acid
CCEFXCCXNXPACTXGC

SEQ ID NO: 5375 - protein, 17 aa, Artificial Sequence
  Synthetically generated peptide
  VARIANT (1)..(17): Xaa = Any Amino Acid
CCEFXCCXNXPACTGXC

SEQ ID NO: 5376 - protein, 16 aa, Artificial Sequence
  Synthetically generated peptide
  VARIANT (1)..(16): Xaa = Any Amino Acid
CCEFXCCXNPXACTGC

SEQ ID NO: 5377 - protein, 17 aa, Artificial Sequence
  Synthetically generated peptide
  VARIANT (1)..(17): Xaa = Any Amino Acid
CCEFXCCXNPXXACTGC

SEQ ID NO: 5378 - protein, 17 aa, Artificial Sequence
  Synthetically generated peptide
  VARIANT (1)..(17): Xaa = Any Amino Acid
CCEFXCCXNPXAXCTGC

SEQ ID NO: 5379 - protein, 17 aa, Artificial Sequence
  Synthetically generated peptide
  VARIANT (1)..(17): Xaa = Any Amino Acid
CCEFXCCXNPXACXTGC

SEQ ID NO: 5380 - protein, 17 aa, Artificial Sequence
  Synthetically generated peptide
  VARIANT (1)..(17): Xaa = Any Amino Acid
CCEFXCCXNPXACTXGC

SEQ ID NO: 5381 - protein, 17 aa, Artificial Sequence
  Synthetically generated peptide
  VARIANT (1)..(17): Xaa = Any Amino Acid
CCEFXCCXNPXACTGXC

SEQ ID NO: 5382 - protein, 16 aa, Artificial Sequence
  Synthetically generated peptide
  VARIANT (1)..(16): Xaa = Any Amino Acid
CCEFXCCXNPAXCTGC

SEQ ID NO: 5383 - protein, 17 aa, Artificial Sequence
  Synthetically generated peptide
  VARIANT (1)..(17): Xaa = Any Amino Acid
CCEFXCCXNPAXXCTGC

SEQ ID NO: 5384 - protein, 17 aa, Artificial Sequence
  Synthetically generated peptide
  VARIANT (1)..(17): Xaa = Any Amino Acid
CCEFXCCXNPAXCXTGC

SEQ ID NO: 5385 - protein, 17 aa, Artificial Sequence
  Synthetically generated peptide
  VARIANT (1)..(17): Xaa = Any Amino Acid
CCEFXCCXNPAXCTXGC

SEQ ID NO: 5386 - protein, 17 aa, Artificial Sequence
  Synthetically generated peptide
  VARIANT (1)..(17): Xaa = Any Amino Acid
CCEFXCCXNPAXCTGXC

SEQ ID NO: 5387 - protein, 16 aa, Artificial Sequence
  Synthetically generated peptide
  VARIANT (1)..(16): Xaa = Any Amino Acid
CCEFXCCXNPACXTGC

SEQ ID NO: 5388 - protein, 17 aa, Artificial Sequence
  Synthetically generated peptide
  VARIANT (1)..(17): Xaa = Any Amino Acid
CCEFXCCXNPACXXTGC

SEQ ID NO: 5389 - protein, 17 aa, Artificial Sequence
  Synthetically generated peptide
  VARIANT (1)..(17): Xaa = Any Amino Acid
CCEFXCCXNPACXTXGC

SEQ ID NO: 5390 - protein, 17 aa, Artificial Sequence
  Synthetically generated peptide
  VARIANT (1)..(17): Xaa = Any Amino Acid
CCEFXCCXNPACXTGXC

SEQ ID NO: 5391 - protein, 16 aa, Artificial Sequence
  Synthetically generated peptide
  VARIANT (1)..(16): Xaa = Any Amino Acid
CCEFXCCXNPACTXGC

SEQ ID NO: 5392 - protein, 17 aa, Artificial Sequence
  Synthetically generated peptide
  VARIANT (1)..(17): Xaa = Any Amino Acid
CCEFXCCXNPACTXXGC

SEQ ID NO: 5393 - protein, 17 aa, Artificial Sequence
  Synthetically generated peptide
  VARIANT (1)..(17): Xaa = Any Amino Acid
CCEFXCCXNPACTXGXC

SEQ ID NO: 5394 - protein, 16 aa, Artificial Sequence
  Synthetically generated peptide
  VARIANT (1)..(16): Xaa = Any Amino Acid
CCEFXCCXNPACTGXC

SEQ ID NO: 5395 - protein, 17 aa, Artificial Sequence
  Synthetically generated peptide
  VARIANT (1)..(17): Xaa = Any Amino Acid
CCEFXCCXNPACTGXXC

SEQ ID NO: 5396 - protein, 15 aa, Artificial Sequence
  Synthetically generated peptide
  VARIANT (1)..(15): Xaa = Any Amino Acid
CCEFXCCNXPACTGC

SEQ ID NO: 5397 - protein, 16 aa, Artificial Sequence
  Synthetically generated peptide
  VARIANT (1)..(16): Xaa = Any Amino Acid
CCEFXCCNXXPACTGC

SEQ ID NO: 5398 - protein, 17 aa, Artificial Sequence
  Synthetically generated peptide
  VARIANT (1)..(17): Xaa = Any Amino Acid
CCEFXCCNXXXPACTGC

SEQ ID NO: 5399 - protein, 17 aa, Artificial Sequence
  Synthetically generated peptide
  VARIANT (1)..(17): Xaa = Any Amino Acid
CCEFXCCNXXPXACTGC

SEQ ID NO: 5400 - protein, 17 aa, Artificial Sequence
  Synthetically generated peptide
  VARIANT (1)..(17): Xaa = Any Amino Acid
CCEFXCCNXXPAXCTGC

SEQ ID NO: 5401 - protein, 17 aa, Artificial Sequence
  Synthetically generated peptide
  VARIANT (1)..(17): Xaa = Any Amino Acid
CCEFXCCNXXPACXTGC

SEQ ID NO: 5402 - protein, 17 aa, Artificial Sequence
  Synthetically generated peptide
  VARIANT (1)..(17): Xaa = Any Amino Acid
CCEFXCCNXXPACTXGC

SEQ ID NO: 5403 - protein, 17 aa, Artificial Sequence
  Synthetically generated peptide
  VARIANT (1)..(17): Xaa = Any Amino Acid
CCEFXCCNXXPACTGXC

SEQ ID NO: 5404 - protein, 16 aa, Artificial Sequence
  Synthetically generated peptide
  VARIANT (1)..(16): Xaa = Any Amino Acid
CCEFXCCNXPXACTGC

SEQ ID NO: 5405 - protein, 17 aa, Artificial Sequence
  Synthetically generated peptide
  VARIANT (1)..(17): Xaa = Any Amino Acid
CCEFXCCNXPXXACTGC

SEQ ID NO: 5406 - protein, 17 aa, Artificial Sequence
  Synthetically generated peptide
  VARIANT (1)..(17): Xaa = Any Amino Acid
CCEFXCCNXPXAXCTGC

SEQ ID NO: 5407 - protein, 17 aa, Artificial Sequence
  Synthetically generated peptide
  VARIANT (1)..(17): Xaa = Any Amino Acid
CCEFXCCNXPXACXTGC

SEQ ID NO: 5408 - protein, 17 aa, Artificial Sequence
  Synthetically generated peptide
  VARIANT (1)..(17): Xaa = Any Amino Acid
CCEFXCCNXPXACTXGC

SEQ ID NO: 5409 - protein, 17 aa, Artificial Sequence
  Synthetically generated peptide
  VARIANT (1)..(17): Xaa = Any Amino Acid
CCEFXCCNXPXACTGXC

SEQ ID NO: 5410 - protein, 16 aa, Artificial Sequence
  Synthetically generated peptide
  VARIANT (1)..(16): Xaa = Any Amino Acid
CCEFXCCNXPAXCTGC

SEQ ID NO: 5411 - protein, 17 aa, Artificial Sequence
  Synthetically generated peptide
  VARIANT (1)..(17): Xaa = Any Amino Acid
CCEFXCCNXPAXXCTGC

SEQ ID NO: 5412 - protein, 17 aa, Artificial Sequence
  Synthetically generated peptide
  VARIANT (1)..(17): Xaa = Any Amino Acid
CCEFXCCNXPAXCXTGC

SEQ ID NO: 5413 - protein, 17 aa, Artificial Sequence
  Synthetically generated peptide
  VARIANT (1)..(17): Xaa = Any Amino Acid
CCEFXCCNXPAXCTXGC

SEQ ID NO: 5414 - protein, 17 aa, Artificial Sequence
  Synthetically generated peptide
  VARIANT (1)..(17): Xaa = Any Amino Acid
CCEFXCCNXPAXCTGXC

SEQ ID NO: 5415 - protein, 16 aa, Artificial Sequence
  Synthetically generated peptide
  VARIANT (1)..(16): Xaa = Any Amino Acid
CCEFXCCNXPACXTGC

SEQ ID NO: 5416 - protein, 17 aa, Artificial Sequence
  Synthetically generated peptide
  VARIANT (1)..(17): Xaa = Any Amino Acid
CCEFXCCNXPACXXTGC

SEQ ID NO: 5417 - protein, 17 aa, Artificial Sequence
  Synthetically generated peptide
  VARIANT (1)..(17): Xaa = Any Amino Acid
CCEFXCCNXPACXTXGC

SEQ ID NO: 5418 - protein, 17 aa, Artificial Sequence
  Synthetically generated peptide
  VARIANT (1)..(17): Xaa = Any Amino Acid
CCEFXCCNXPACXTGXC

SEQ ID NO: 5419 - protein, 16 aa, Artificial Sequence
  Synthetically generated peptide
  VARIANT (1)..(16): Xaa = Any Amino Acid
CCEFXCCNXPACTXGC

SEQ ID NO: 5420 - protein, 17 aa, Artificial Sequence
  Synthetically generated peptide
  VARIANT (1)..(17): Xaa = Any Amino Acid
CCEFXCCNXPACTXXGC

SEQ ID NO: 5421 - protein, 17 aa, Artificial Sequence
  Synthetically generated peptide
  VARIANT (1)..(17): Xaa = Any Amino Acid
CCEFXCCNXPACTXGXC

SEQ ID NO: 5422 - protein, 16 aa, Artificial Sequence
  Synthetically generated peptide
  VARIANT (1)..(16): Xaa = Any Amino Acid
CCEFXCCNXPACTGXC

SEQ ID NO: 5423 - protein, 17 aa, Artificial Sequence
  Synthetically generated peptide
  VARIANT (1)..(17): Xaa = Any Amino Acid
CCEFXCCNXPACTGXXC

SEQ ID NO: 5424 - protein, 15 aa, Artificial Sequence
  Synthetically generated peptide
  VARIANT (1)..(15): Xaa = Any Amino Acid
CCEFXCCNPXACTGC

SEQ ID NO: 5425 - protein, 16 aa, Artificial Sequence
  Synthetically generated peptide
  VARIANT (1)..(16): Xaa = Any Amino Acid
CCEFXCCNPXXACTGC

SEQ ID NO: 5426 - protein, 17 aa, Artificial Sequence
  Synthetically generated peptide
  VARIANT (1)..(17): Xaa = Any Amino Acid
CCEFXCCNPXXXACTGC

SEQ ID NO: 5427 - protein, 17 aa, Artificial Sequence
  Synthetically generated peptide
  VARIANT (1)..(17): Xaa = Any Amino Acid
CCEFXCCNPXXAXCTGC

SEQ ID NO: 5428 - protein, 17 aa, Artificial Sequence
  Synthetically generated peptide
  VARIANT (1)..(17): Xaa = Any Amino Acid
CCEFXCCNPXXACXTGC

SEQ ID NO: 5429 - protein, 17 aa, Artificial Sequence
  Synthetically generated peptide
  VARIANT (1)..(17): Xaa = Any Amino Acid
CCEFXCCNPXXACTXGC

SEQ ID NO: 5430 - protein, 17 aa, Artificial Sequence
  Synthetically generated peptide
  VARIANT (1)..(17): Xaa = Any Amino Acid
CCEFXCCNPXXACTGXC

SEQ ID NO: 5431 - protein, 16 aa, Artificial Sequence
  Synthetically generated peptide
  VARIANT (1)..(16): Xaa = Any Amino Acid
CCEFXCCNPXAXCTGC

SEQ ID NO: 5432 - protein, 17 aa, Artificial Sequence
  Synthetically generated peptide
  VARIANT (1)..(17): Xaa = Any Amino Acid
CCEFXCCNPXAXXCTGC

SEQ ID NO: 5433 - protein, 17 aa, Artificial Sequence
  Synthetically generated peptide
  VARIANT (1)..(17): Xaa = Any Amino Acid
CCEFXCCNPXAXCXTGC

SEQ ID NO: 5434 - protein, 17 aa, Artificial Sequence
  Synthetically generated peptide
  VARIANT (1)..(17): Xaa = Any Amino Acid
CCEFXCCNPXAXCTXGC

SEQ ID NO: 5435 - protein, 17 aa, Artificial Sequence
  Synthetically generated peptide
  VARIANT (1)..(17): Xaa = Any Amino Acid
CCEFXCCNPXAXCTGXC

SEQ ID NO: 5436 - protein, 16 aa, Artificial Sequence
  Synthetically generated peptide
  VARIANT (1)..(16): Xaa = Any Amino Acid
CCEFXCCNPXACXTGC

SEQ ID NO: 5437 - protein, 17 aa, Artificial Sequence
  Synthetically generated peptide
  VARIANT (1)..(17): Xaa = Any Amino Acid
CCEFXCCNPXACXXTGC

SEQ ID NO: 5438 - protein, 17 aa, Artificial Sequence
  Synthetically generated peptide
  VARIANT (1)..(17): Xaa = Any Amino Acid
CCEFXCCNPXACXTXGC

SEQ ID NO: 5439 - protein, 17 aa, Artificial Sequence
  Synthetically generated peptide
  VARIANT (1)..(17): Xaa = Any Amino Acid
CCEFXCCNPXACXTGXC

SEQ ID NO: 5440 - protein, 16 aa, Artificial Sequence
  Synthetically generated peptide
  VARIANT (1)..(16): Xaa = Any Amino Acid
CCEFXCCNPXACTXGC

SEQ ID NO: 5441 - protein, 17 aa, Artificial Sequence
  Synthetically generated peptide
  VARIANT (1)..(17): Xaa = Any Amino Acid
CCEFXCCNPXACTXXGC

SEQ ID NO: 5442 - protein, 17 aa, Artificial Sequence
  Synthetically generated peptide
  VARIANT (1)..(17): Xaa = Any Amino Acid
CCEFXCCNPXACTXGXC

SEQ ID NO: 5443 - protein, 16 aa, Artificial Sequence
  Synthetically generated peptide
  VARIANT (1)..(16): Xaa = Any Amino Acid
CCEFXCCNPXACTGXC

SEQ ID NO: 5444 - protein, 17 aa, Artificial Sequence
  Synthetically generated peptide
  VARIANT (1)..(17): Xaa = Any Amino Acid
CCEFXCCNPXACTGXXC

SEQ ID NO: 5445 - protein, 15 aa, Artificial Sequence
  Synthetically generated peptide
  VARIANT (1)..(15): Xaa = Any Amino Acid
CCEFXCCNPAXCTGC

SEQ ID NO: 5446 - protein, 16 aa, Artificial Sequence
  Synthetically generated peptide
  VARIANT (1)..(16): Xaa = Any Amino Acid
CCEFXCCNPAXXCTGC

SEQ ID NO: 5447 - protein, 17 aa, Artificial Sequence
  Synthetically generated peptide
  VARIANT (1)..(17): Xaa = Any Amino Acid
CCEFXCCNPAXXXCTGC

SEQ ID NO: 5448 - protein, 17 aa, Artificial Sequence
  Synthetically generated peptide
  VARIANT (1)..(17): Xaa = Any Amino Acid
CCEFXCCNPAXXCXTGC

SEQ ID NO: 5449 - protein, 17 aa, Artificial Sequence
  Synthetically generated peptide
  VARIANT (1)..(17): Xaa = Any Amino Acid
CCEFXCCNPAXXCTXGC

SEQ ID NO: 5450 - protein, 17 aa, Artificial Sequence
  Synthetically generated peptide
  VARIANT (1)..(17): Xaa = Any Amino Acid
CCEFXCCNPAXXCTGXC

SEQ ID NO: 5451 - protein, 16 aa, Artificial Sequence
  Synthetically generated peptide
  VARIANT (1)..(16): Xaa = Any Amino Acid
CCEFXCCNPAXCXTGC

SEQ ID NO: 5452 - protein, 17 aa, Artificial Sequence
  Synthetically generated peptide
  VARIANT (1)..(17): Xaa = Any Amino Acid
CCEFXCCNPAXCXXTGC

SEQ ID NO: 5453 - protein, 17 aa, Artificial Sequence
  Synthetically generated peptide
  VARIANT (1)..(17): Xaa = Any Amino Acid
CCEFXCCNPAXCXTXGC

SEQ ID NO: 5454 - protein, 17 aa, Artificial Sequence
  Synthetically generated peptide
  VARIANT (1)..(17): Xaa = Any Amino Acid
CCEFXCCNPAXCXTGXC

SEQ ID NO: 5455 - protein, 16 aa, Artificial Sequence
  Synthetically generated peptide
  VARIANT (1)..(16): Xaa = Any Amino Acid
CCEFXCCNPAXCTXGC

SEQ ID NO: 5456 - protein, 17 aa, Artificial Sequence
  Synthetically generated peptide
  VARIANT (1)..(17): Xaa = Any Amino Acid
CCEFXCCNPAXCTXXGC

SEQ ID NO: 5457 - protein, 17 aa, Artificial Sequence
  Synthetically generated peptide
  VARIANT (1)..(17): Xaa = Any Amino Acid
CCEFXCCNPAXCTXGXC

SEQ ID NO: 5458 - protein, 16 aa, Artificial Sequence
  Synthetically generated peptide
  VARIANT (1)..(16): Xaa = Any Amino Acid
CCEFXCCNPAXCTGXC

SEQ ID NO: 5459 - protein, 17 aa, Artificial Sequence
  Synthetically generated peptide
  VARIANT (1)..(17): Xaa = Any Amino Acid
CCEFXCCNPAXCTGXXC

SEQ ID NO: 5460 - protein, 15 aa, Artificial Sequence
  Synthetically generated peptide
  VARIANT (1)..(15): Xaa = Any Amino Acid
CCEFXCCNPACXTGC

SEQ ID NO: 5461 - protein, 16 aa, Artificial Sequence
  Synthetically generated peptide
  VARIANT (1)..(16): Xaa = Any Amino Acid
CCEFXCCNPACXXTGC

SEQ ID NO: 5462 - protein, 17 aa, Artificial Sequence
  Synthetically generated peptide
  VARIANT (1)..(17): Xaa = Any Amino Acid
CCEFXCCNPACXXXTGC

SEQ ID NO: 5463 - protein, 17 aa, Artificial Sequence
  Synthetically generated peptide
  VARIANT (1)..(17): Xaa = Any Amino Acid
CCEFXCCNPACXXTXGC

SEQ ID NO: 5464 - protein, 17 aa, Artificial Sequence
  Synthetically generated peptide
  VARIANT (1)..(17): Xaa = Any Amino Acid
CCEFXCCNPACXXTGXC

SEQ ID NO: 5465 - protein, 16 aa, Artificial Sequence
  Synthetically generated peptide
  VARIANT (1)..(16): Xaa = Any Amino Acid
CCEFXCCNPACXTXGC

SEQ ID NO: 5466 - protein, 17 aa, Artificial Sequence
  Synthetically generated peptide
  VARIANT (1)..(17): Xaa = Any Amino Acid
CCEFXCCNPACXTXXGC

SEQ ID NO: 5467 - protein, 17 aa, Artificial Sequence
  Synthetically generated peptide
  VARIANT (1)..(17): Xaa = Any Amino Acid
CCEFXCCNPACXTXGXC

SEQ ID NO: 5468 - protein, 16 aa, Artificial Sequence
  Synthetically generated peptide
  VARIANT (1)..(16): Xaa = Any Amino Acid
CCEFXCCNPACXTGXC

SEQ ID NO: 5469 - protein, 17 aa, Artificial Sequence
  Synthetically generated peptide
  VARIANT (1)..(17): Xaa = Any Amino Acid
CCEFXCCNPACXTGXXC

SEQ ID NO: 5470 - protein, 15 aa, Artificial Sequence
  Synthetically generated peptide
  VARIANT (1)..(15): Xaa = Any Amino Acid
CCEFXCCNPACTXGC

SEQ ID NO: 5471 - protein, 16 aa, Artificial Sequence
  Synthetically generated peptide
  VARIANT (1)..(16): Xaa = Any Amino Acid
CCEFXCCNPACTXXGC

SEQ ID NO: 5472 - protein, 17 aa, Artificial Sequence
  Synthetically generated peptide
  VARIANT (1)..(17): Xaa = Any Amino Acid
CCEFXCCNPACTXXXGC

SEQ ID NO: 5473 - protein, 17 aa, Artificial Sequence
  Synthetically generated peptide
  VARIANT (1)..(17): Xaa = Any Amino Acid
CCEFXCCNPACTXXGXC

SEQ ID NO: 5474 - protein, 16 aa, Artificial Sequence
  Synthetically generated peptide
  VARIANT (1)..(16): Xaa = Any Amino Acid
CCEFXCCNPACTXGXC

SEQ ID NO: 5475 - protein, 17 aa, Artificial Sequence
  Synthetically generated peptide
  VARIANT (1)..(17): Xaa = Any Amino Acid
CCEFXCCNPACTXGXXC

SEQ ID NO: 5476 - protein, 15 aa, Artificial Sequence
  Synthetically generated peptide
  VARIANT (1)..(15): Xaa = Any Amino Acid
CCEFXCCNPACTGXC

SEQ ID NO: 5477 - protein, 16 aa, Artificial Sequence
  Synthetically generated peptide
  VARIANT (1)..(16): Xaa = Any Amino Acid
CCEFXCCNPACTGXXC

SEQ ID NO: 5478 - protein, 17 aa, Artificial Sequence
  Synthetically generated peptide
  VARIANT (1)..(17): Xaa = Any Amino Acid
CCEFXCCNPACTGXXXC

SEQ ID NO: 5479 - protein, 14 aa, Artificial Sequence
  Synthetically generated peptide
  VARIANT (1)..(14): Xaa = Any Amino Acid
CCEFCCXNPACTGC

SEQ ID NO: 5480 - protein, 15 aa, Artificial Sequence
  Synthetically generated peptide
  VARIANT (1)..(15): Xaa = Any Amino Acid
CCEFCCXXNPACTGC

SEQ ID NO: 5481 - protein, 16 aa, Artificial Sequence
  Synthetically generated peptide
  VARIANT (1)..(16): Xaa = Any Amino Acid
CCEFCCXXXNPACTGC

SEQ ID NO: 5482 - protein, 17 aa, Artificial Sequence
  Synthetically generated peptide
  VARIANT (1)..(17): Xaa = Any Amino Acid
CCEFCCXXXXNPACTGC

SEQ ID NO: 5483 - protein, 17 aa, Artificial Sequence
  Synthetically generated peptide
  VARIANT (1)..(17): Xaa = Any Amino Acid
CCEFCCXXXNXPACTGC

SEQ ID NO: 5484 - protein, 17 aa, Artificial Sequence
  Synthetically generated peptide
  VARIANT (1)..(17): Xaa = Any Amino Acid
CCEFCCXXXNPXACTGC

SEQ ID NO: 5485 - protein, 17 aa, Artificial Sequence
  Synthetically generated peptide
  VARIANT (1)..(17): Xaa = Any Amino Acid
CCEFCCXXXNPAXCTGC

SEQ ID NO: 5486 - protein, 17 aa, Artificial Sequence
  Synthetically generated peptide
  VARIANT (1)..(17): Xaa = Any Amino Acid
CCEFCCXXXNPACXTGC

SEQ ID NO: 5487 - protein, 17 aa, Artificial Sequence
  Synthetically generated peptide
  VARIANT (1)..(17): Xaa = Any Amino Acid
CCEFCCXXXNPACTXGC

SEQ ID NO: 5488 - protein, 17 aa, Artificial Sequence
  Synthetically generated peptide
  VARIANT (1)..(17): Xaa = Any Amino Acid
CCEFCCXXXNPACTGXC

SEQ ID NO: 5489 - protein, 16 aa, Artificial Sequence
  Synthetically generated peptide
  VARIANT (1)..(16): Xaa = Any Amino Acid
CCEFCCXXNXPACTGC

SEQ ID NO: 5490 - protein, 17 aa, Artificial Sequence
  Synthetically generated peptide
  VARIANT (1)..(17): Xaa = Any Amino Acid
CCEFCCXXNXXPACTGC

SEQ ID NO: 5491 - protein, 17 aa, Artificial Sequence
  Synthetically generated peptide
  VARIANT (1)..(17): Xaa = Any Amino Acid
CCEFCCXXNXPXACTGC

SEQ ID NO: 5492 - protein, 17 aa, Artificial Sequence
  Synthetically generated peptide
  VARIANT (1)..(17): Xaa = Any Amino Acid
CCEFCCXXNXPAXCTGC

SEQ ID NO: 5493 - protein, 17 aa, Artificial Sequence
  Synthetically generated peptide
  VARIANT (1)..(17): Xaa = Any Amino Acid
CCEFCCXXNXPACXTGC

SEQ ID NO: 5494 - protein, 17 aa, Artificial Sequence
  Synthetically generated peptide
  VARIANT (1)..(17): Xaa = Any Amino Acid
CCEFCCXXNXPACTXGC

SEQ ID NO: 5495 - protein, 17 aa, Artificial Sequence
  Synthetically generated peptide
  VARIANT (1)..(17): Xaa = Any Amino Acid
CCEFCCXXNXPACTGXC

SEQ ID NO: 5496 - protein, 16 aa, Artificial Sequence
  Synthetically generated peptide
  VARIANT (1)..(16): Xaa = Any Amino Acid
CCEFCCXXNPXACTGC

SEQ ID NO: 5497 - protein, 17 aa, Artificial Sequence
  Synthetically generated peptide
  VARIANT (1)..(17): Xaa = Any Amino Acid
CCEFCCXXNPXXACTGC

SEQ ID NO: 5498 - protein, 17 aa, Artificial Sequence
  Synthetically generated peptide
  VARIANT (1)..(17): Xaa = Any Amino Acid
CCEFCCXXNPXAXCTGC

SEQ ID NO: 5499 - protein, 17 aa, Artificial Sequence
  Synthetically generated peptide
  VARIANT (1)..(17): Xaa = Any Amino Acid
CCEFCCXXNPXACXTGC

SEQ ID NO: 5500 - protein, 17 aa, Artificial Sequence
  Synthetically generated peptide
  VARIANT (1)..(17): Xaa = Any Amino Acid
CCEFCCXXNPXACTXGC

SEQ ID NO: 5501 - protein, 17 aa, Artificial Sequence
  Synthetically generated peptide
  VARIANT (1)..(17): Xaa = Any Amino Acid
CCEFCCXXNPXACTGXC

SEQ ID NO: 5502 - protein, 16 aa, Artificial Sequence
  Synthetically generated peptide
  VARIANT (1)..(16): Xaa = Any Amino Acid
CCEFCCXXNPAXCTGC

SEQ ID NO: 5503 - protein, 17 aa, Artificial Sequence
  Synthetically generated peptide
  VARIANT (1)..(17): Xaa = Any Amino Acid
CCEFCCXXNPAXXCTGC

SEQ ID NO: 5504 - protein, 17 aa, Artificial Sequence
  Synthetically generated peptide
  VARIANT (1)..(17): Xaa = Any Amino Acid
CCEFCCXXNPAXCXTGC

SEQ ID NO: 5505 - protein, 17 aa, Artificial Sequence
  Synthetically generated peptide
  VARIANT (1)..(17): Xaa = Any Amino Acid
CCEFCCXXNPAXCTXGC

SEQ ID NO: 5506 - protein, 17 aa, Artificial Sequence
  Synthetically generated peptide
  VARIANT (1)..(17): Xaa = Any Amino Acid
CCEFCCXXNPAXCTGXC

SEQ ID NO: 5507 - protein, 16 aa, Artificial Sequence
  Synthetically generated peptide
  VARIANT (1)..(16): Xaa = Any Amino Acid
CCEFCCXXNPACXTGC

SEQ ID NO: 5508 - protein, 17 aa, Artificial Sequence
  Synthetically generated peptide
  VARIANT (1)..(17): Xaa = Any Amino Acid
CCEFCCXXNPACXXTGC

SEQ ID NO: 5509 - protein, 17 aa, Artificial Sequence
  Synthetically generated peptide
  VARIANT (1)..(17): Xaa = Any Amino Acid
CCEFCCXXNPACXTXGC

SEQ ID NO: 5510 - protein, 17 aa, Artificial Sequence
  Synthetically generated peptide
  VARIANT (1)..(17): Xaa = Any Amino Acid
CCEFCCXXNPACXTGXC

SEQ ID NO: 5511 - protein, 16 aa, Artificial Sequence
  Synthetically generated peptide
  VARIANT (1)..(16): Xaa = Any Amino Acid
CCEFCCXXNPACTXGC

SEQ ID NO: 5512 - protein, 17 aa, Artificial Sequence
  Synthetically generated peptide
  VARIANT (1)..(17): Xaa = Any Amino Acid
CCEFCCXXNPACTXXGC

SEQ ID NO: 5513 - protein, 17 aa, Artificial Sequence
  Synthetically generated peptide
  VARIANT (1)..(17): Xaa = Any Amino Acid
CCEFCCXXNPACTXGXC

SEQ ID NO: 5514 - protein, 16 aa, Artificial Sequence
  Synthetically generated peptide
  VARIANT (1)..(16): Xaa = Any Amino Acid
CCEFCCXXNPACTGXC

SEQ ID NO: 5515 - protein, 17 aa, Artificial Sequence
  Synthetically generated peptide
  VARIANT (1)..(17): Xaa = Any Amino Acid
CCEFCCXXNPACTGXXC

SEQ ID NO: 5516 - protein, 15 aa, Artificial Sequence
  Synthetically generated peptide
  VARIANT (1)..(15): Xaa = Any Amino Acid
CCEFCCXNXPACTGC

SEQ ID NO: 5517 - protein, 16 aa, Artificial Sequence
  Synthetically generated peptide
  VARIANT (1)..(16): Xaa = Any Amino Acid
CCEFCCXNXXPACTGC

SEQ ID NO: 5518 - protein, 17 aa, Artificial Sequence
  Synthetically generated peptide
  VARIANT (1)..(17): Xaa = Any Amino Acid
CCEFCCXNXXXPACTGC

SEQ ID NO: 5519 - protein, 17 aa, Artificial Sequence
  Synthetically generated peptide
  VARIANT (1)..(17): Xaa = Any Amino Acid
CCEFCCXNXXPXACTGC

SEQ ID NO: 5520 - protein, 17 aa, Artificial Sequence
  Synthetically generated peptide
  VARIANT (1)..(17): Xaa = Any Amino Acid
CCEFCCXNXXPAXCTGC

SEQ ID NO: 5521 - protein, 17 aa, Artificial Sequence
  Synthetically generated peptide
  VARIANT (1)..(17): Xaa = Any Amino Acid
CCEFCCXNXXPACXTGC

SEQ ID NO: 5522 - protein, 17 aa, Artificial Sequence
  Synthetically generated peptide
  VARIANT (1)..(17): Xaa = Any Amino Acid
CCEFCCXNXXPACTXGC

SEQ ID NO: 5523 - protein, 17 aa, Artificial Sequence
  Synthetically generated peptide
  VARIANT (1)..(17): Xaa = Any Amino Acid
CCEFCCXNXXPACTGXC

SEQ ID NO: 5524 - protein, 16 aa, Artificial Sequence
  Synthetically generated peptide
  VARIANT (1)..(16): Xaa = Any Amino Acid
CCEFCCXNXPXACTGC

SEQ ID NO: 5525 - protein, 17 aa, Artificial Sequence
  Synthetically generated peptide
  VARIANT (1)..(17): Xaa = Any Amino Acid
CCEFCCXNXPXXACTGC

SEQ ID NO: 5526 - protein, 17 aa, Artificial Sequence
  Synthetically generated peptide
  VARIANT (1)..(17): Xaa = Any Amino Acid
CCEFCCXNXPXAXCTGC

SEQ ID NO: 5527 - protein, 17 aa, Artificial Sequence
  Synthetically generated peptide
  VARIANT (1)..(17): Xaa = Any Amino Acid
CCEFCCXNXPXACXTGC

SEQ ID NO: 5528 - protein, 17 aa, Artificial Sequence
  Synthetically generated peptide
  VARIANT (1)..(17): Xaa = Any Amino Acid
CCEFCCXNXPXACTXGC

SEQ ID NO: 5529 - protein, 17 aa, Artificial Sequence
  Synthetically generated peptide
  VARIANT (1)..(17): Xaa = Any Amino Acid
CCEFCCXNXPXACTGXC

SEQ ID NO: 5530 - protein, 16 aa, Artificial Sequence
  Synthetically generated peptide
  VARIANT (1)..(16): Xaa = Any Amino Acid
CCEFCCXNXPAXCTGC

SEQ ID NO: 5531 - protein, 17 aa, Artificial Sequence
  Synthetically generated peptide
  VARIANT (1)..(17): Xaa = Any Amino Acid
CCEFCCXNXPAXXCTGC

SEQ ID NO: 5532 - protein, 17 aa, Artificial Sequence
  Synthetically generated peptide
  VARIANT (1)..(17): Xaa = Any Amino Acid
CCEFCCXNXPAXCXTGC

SEQ ID NO: 5533 - protein, 17 aa, Artificial Sequence
  Synthetically generated peptide
  VARIANT (1)..(17): Xaa = Any Amino Acid
CCEFCCXNXPAXCTXGC

SEQ ID NO: 5534 - protein, 17 aa, Artificial Sequence
  Synthetically generated peptide
  VARIANT (1)..(17): Xaa = Any Amino Acid
CCEFCCXNXPAXCTGXC

SEQ ID NO: 5535 - protein, 16 aa, Artificial Sequence
  Synthetically generated peptide
  VARIANT (1)..(16): Xaa = Any Amino Acid
CCEFCCXNXPACXTGC

SEQ ID NO: 5536 - protein, 17 aa, Artificial Sequence
  Synthetically generated peptide
  VARIANT (1)..(17): Xaa = Any Amino Acid
CCEFCCXNXPACXXTGC

SEQ ID NO: 5537 - protein, 17 aa, Artificial Sequence
  Synthetically generated peptide
  VARIANT (1)..(17): Xaa = Any Amino Acid
CCEFCCXNXPACXTXGC

SEQ ID NO: 5538 - protein, 17 aa, Artificial Sequence
  Synthetically generated peptide
  VARIANT (1)..(17): Xaa = Any Amino Acid
CCEFCCXNXPACXTGXC

SEQ ID NO: 5539 - protein, 16 aa, Artificial Sequence
  Synthetically generated peptide
  VARIANT (1)..(16): Xaa = Any Amino Acid
CCEFCCXNXPACTXGC

SEQ ID NO: 5540 - protein, 17 aa, Artificial Sequence
  Synthetically generated peptide
  VARIANT (1)..(17): Xaa = Any Amino Acid
CCEFCCXNXPACTXXGC

SEQ ID NO: 5541 - protein, 17 aa, Artificial Sequence
  Synthetically generated peptide
  VARIANT (1)..(17): Xaa = Any Amino Acid
CCEFCCXNXPACTXGXC

SEQ ID NO: 5542 - protein, 16 aa, Artificial Sequence
  Synthetically generated peptide
  VARIANT (1)..(16): Xaa = Any Amino Acid
CCEFCCXNXPACTGXC

SEQ ID NO: 5543 - protein, 17 aa, Artificial Sequence
  Synthetically generated peptide
  VARIANT (1)..(17): Xaa = Any Amino Acid
CCEFCCXNXPACTGXXC

SEQ ID NO: 5544 - protein, 15 aa, Artificial Sequence
  Synthetically generated peptide
  VARIANT (1)..(15): Xaa = Any Amino Acid
CCEFCCXNPXACTGC

SEQ ID NO: 5545 - protein, 16 aa, Artificial Sequence
  Synthetically generated peptide
  VARIANT (1)..(16): Xaa = Any Amino Acid
CCEFCCXNPXXACTGC

SEQ ID NO: 5546 - protein, 17 aa, Artificial Sequence
  Synthetically generated peptide
  VARIANT (1)..(17): Xaa = Any Amino Acid
CCEFCCXNPXXXACTGC

SEQ ID NO: 5547 - protein, 17 aa, Artificial Sequence
  Synthetically generated peptide
  VARIANT (1)..(17): Xaa = Any Amino Acid
CCEFCCXNPXXAXCTGC

SEQ ID NO: 5548 - protein, 17 aa, Artificial Sequence
  Synthetically generated peptide
  VARIANT (1)..(17): Xaa = Any Amino Acid
CCEFCCXNPXXACXTGC

SEQ ID NO: 5549 - protein, 17 aa, Artificial Sequence
  Synthetically generated peptide
  VARIANT (1)..(17): Xaa = Any Amino Acid
CCEFCCXNPXXACTXGC

SEQ ID NO: 5550 - protein, 17 aa, Artificial Sequence
  Synthetically generated peptide
  VARIANT (1)..(17): Xaa = Any Amino Acid
CCEFCCXNPXXACTGXC

SEQ ID NO: 5551 - protein, 16 aa, Artificial Sequence
  Synthetically generated peptide
  VARIANT (1)..(16): Xaa = Any Amino Acid
CCEFCCXNPXAXCTGC

SEQ ID NO: 5552 - protein, 17 aa, Artificial Sequence
  Synthetically generated peptide
  VARIANT (1)..(17): Xaa = Any Amino Acid
CCEFCCXNPXAXXCTGC

SEQ ID NO: 5553 - protein, 17 aa, Artificial Sequence
  Synthetically generated peptide
  VARIANT (1)..(17): Xaa = Any Amino Acid
CCEFCCXNPXAXCXTGC

SEQ ID NO: 5554 - protein, 17 aa, Artificial Sequence
  Synthetically generated peptide
  VARIANT (1)..(17): Xaa = Any Amino Acid
CCEFCCXNPXAXCTXGC

SEQ ID NO: 5555 - protein, 17 aa, Artificial Sequence
  Synthetically generated peptide
  VARIANT (1)..(17): Xaa = Any Amino Acid
CCEFCCXNPXAXCTGXC

SEQ ID NO: 5556 - protein, 16 aa, Artificial Sequence
  Synthetically generated peptide
  VARIANT (1)..(16): Xaa = Any Amino Acid
CCEFCCXNPXACXTGC

SEQ ID NO: 5557 - protein, 17 aa, Artificial Sequence
  Synthetically generated peptide
  VARIANT (1)..(17): Xaa = Any Amino Acid
CCEFCCXNPXACXXTGC

SEQ ID NO: 5558 - protein, 17 aa, Artificial Sequence
  Synthetically generated peptide
  VARIANT (1)..(17): Xaa = Any Amino Acid
CCEFCCXNPXACXTXGC

SEQ ID NO: 5559 - protein, 17 aa, Artificial Sequence
  Synthetically generated peptide
  VARIANT (1)..(17): Xaa = Any Amino Acid
CCEFCCXNPXACXTGXC

SEQ ID NO: 5560 - protein, 16 aa, Artificial Sequence
  Synthetically generated peptide
  VARIANT (1)..(16): Xaa = Any Amino Acid
CCEFCCXNPXACTXGC

SEQ ID NO: 5561 - protein, 17 aa, Artificial Sequence
  Synthetically generated peptide
  VARIANT (1)..(17): Xaa = Any Amino Acid
CCEFCCXNPXACTXXGC

SEQ ID NO: 5562 - protein, 17 aa, Artificial Sequence
  Synthetically generated peptide
  VARIANT (1)..(17): Xaa = Any Amino Acid
CCEFCCXNPXACTXGXC

SEQ ID NO: 5563 - protein, 16 aa, Artificial Sequence
  Synthetically generated peptide
  VARIANT (1)..(16): Xaa = Any Amino Acid
CCEFCCXNPXACTGXC

SEQ ID NO: 5564 - protein, 17 aa, Artificial Sequence
  Synthetically generated peptide
  VARIANT (1)..(17): Xaa = Any Amino Acid
CCEFCCXNPXACTGXXC

SEQ ID NO: 5565 - protein, 15 aa, Artificial Sequence
  Synthetically generated peptide
  VARIANT (1)..(15): Xaa = Any Amino Acid
CCEFCCXNPAXCTGC

SEQ ID NO: 5566 - protein, 16 aa, Artificial Sequence
  Synthetically generated peptide
  VARIANT (1)..(16): Xaa = Any Amino Acid
CCEFCCXNPAXXCTGC

SEQ ID NO: 5567 - protein, 17 aa, Artificial Sequence
  Synthetically generated peptide
  VARIANT (1)..(17): Xaa = Any Amino Acid
CCEFCCXNPAXXXCTGC

SEQ ID NO: 5568 - protein, 17 aa, Artificial Sequence
  Synthetically generated peptide
  VARIANT (1)..(17): Xaa = Any Amino Acid
CCEFCCXNPAXXCXTGC

SEQ ID NO: 5569 - protein, 17 aa, Artificial Sequence
  Synthetically generated peptide
  VARIANT (1)..(17): Xaa = Any Amino Acid
CCEFCCXNPAXXCTXGC

SEQ ID NO: 5570 - protein, 17 aa, Artificial Sequence
  Synthetically generated peptide
  VARIANT (1)..(17): Xaa = Any Amino Acid
CCEFCCXNPAXXCTGXC

SEQ ID NO: 5571 - protein, 16 aa, Artificial Sequence
  Synthetically generated peptide
  VARIANT (1)..(16): Xaa = Any Amino Acid
CCEFCCXNPAXCXTGC

SEQ ID NO: 5572 - protein, 17 aa, Artificial Sequence
  Synthetically generated peptide
  VARIANT (1)..(17): Xaa = Any Amino Acid
CCEFCCXNPAXCXXTGC

SEQ ID NO: 5573 - protein, 17 aa, Artificial Sequence
  Synthetically generated peptide
  VARIANT (1)..(17): Xaa = Any Amino Acid
CCEFCCXNPAXCXTXGC

SEQ ID NO: 5574 - protein, 17 aa, Artificial Sequence
  Synthetically generated peptide
  VARIANT (1)..(17): Xaa = Any Amino Acid
CCEFCCXNPAXCXTGXC

SEQ ID NO: 5575 - protein, 16 aa, Artificial Sequence
  Synthetically generated peptide
  VARIANT (1)..(16): Xaa = Any Amino Acid
CCEFCCXNPAXCTXGC

SEQ ID NO: 5576 - protein, 17 aa, Artificial Sequence
  Synthetically generated peptide
  VARIANT (1)..(17): Xaa = Any Amino Acid
CCEFCCXNPAXCTXXGC

SEQ ID NO: 5577 - protein, 17 aa, Artificial Sequence
  Synthetically generated peptide
  VARIANT (1)..(17): Xaa = Any Amino Acid
CCEFCCXNPAXCTXGXC

SEQ ID NO: 5578 - protein, 16 aa, Artificial Sequence
  Synthetically generated peptide
  VARIANT (1)..(16): Xaa = Any Amino Acid
CCEFCCXNPAXCTGXC

SEQ ID NO: 5579 - protein, 17 aa, Artificial Sequence
  Synthetically generated peptide
  VARIANT (1)..(17): Xaa = Any Amino Acid
CCEFCCXNPAXCTGXXC

SEQ ID NO: 5580 - protein, 15 aa, Artificial Sequence
  Synthetically generated peptide
  VARIANT (1)..(15): Xaa = Any Amino Acid
CCEFCCXNPACXTGC

SEQ ID NO: 5581 - protein, 16 aa, Artificial Sequence
  Synthetically generated peptide
  VARIANT (1)..(16): Xaa = Any Amino Acid
CCEFCCXNPACXXTGC

SEQ ID NO: 5582 - protein, 17 aa, Artificial Sequence
  Synthetically generated peptide
  VARIANT (1)..(17): Xaa = Any Amino Acid
CCEFCCXNPACXXXTGC

SEQ ID NO: 5583 - protein, 17 aa, Artificial Sequence
  Synthetically generated peptide
  VARIANT (1)..(17): Xaa = Any Amino Acid
CCEFCCXNPACXXTXGC

SEQ ID NO: 5584 - protein, 17 aa, Artificial Sequence
  Synthetically generated peptide
  VARIANT (1)..(17): Xaa = Any Amino Acid
CCEFCCXNPACXXTGXC

SEQ ID NO: 5585 - protein, 16 aa, Artificial Sequence
  Synthetically generated peptide
  VARIANT (1)..(16): Xaa = Any Amino Acid
CCEFCCXNPACXTXGC

SEQ ID NO: 5586 - protein, 17 aa, Artificial Sequence
  Synthetically generated peptide
  VARIANT (1)..(17): Xaa = Any Amino Acid
CCEFCCXNPACXTXXGC

SEQ ID NO: 5587 - protein, 17 aa, Artificial Sequence
  Synthetically generated peptide
  VARIANT (1)..(17): Xaa = Any Amino Acid
CCEFCCXNPACXTXGXC

SEQ ID NO: 5588 - protein, 16 aa, Artificial Sequence
  Synthetically generated peptide
  VARIANT (1)..(16): Xaa = Any Amino Acid
CCEFCCXNPACXTGXC

SEQ ID NO: 5589 - protein, 17 aa, Artificial Sequence
  Synthetically generated peptide
  VARIANT (1)..(17): Xaa = Any Amino Acid
CCEFCCXNPACXTGXXC

SEQ ID NO: 5590 - protein, 15 aa, Artificial Sequence
  Synthetically generated peptide
  VARIANT (1)..(15): Xaa = Any Amino Acid
CCEFCCXNPACTXGC

SEQ ID NO: 5591 - protein, 16 aa, Artificial Sequence
  Synthetically generated peptide
  VARIANT (1)..(16): Xaa = Any Amino Acid
CCEFCCXNPACTXXGC

SEQ ID NO: 5592 - protein, 17 aa, Artificial Sequence
  Synthetically generated peptide
  VARIANT (1)..(17): Xaa = Any Amino Acid
CCEFCCXNPACTXXXGC

SEQ ID NO: 5593 - protein, 17 aa, Artificial Sequence
  Synthetically generated peptide
  VARIANT (1)..(17): Xaa = Any Amino Acid
CCEFCCXNPACTXXGXC

SEQ ID NO: 5594 - protein, 16 aa, Artificial Sequence
  Synthetically generated peptide
  VARIANT (1)..(16): Xaa = Any Amino Acid
CCEFCCXNPACTXGXC

SEQ ID NO: 5595 - protein, 17 aa, Artificial Sequence
  Synthetically generated peptide
  VARIANT (1)..(17): Xaa = Any Amino Acid
CCEFCCXNPACTXGXXC

SEQ ID NO: 5596 - protein, 15 aa, Artificial Sequence
  Synthetically generated peptide
  VARIANT (1)..(15): Xaa = Any Amino Acid
CCEFCCXNPACTGXC

SEQ ID NO: 5597 - protein, 16 aa, Artificial Sequence
  Synthetically generated peptide
  VARIANT (1)..(16): Xaa = Any Amino Acid
CCEFCCXNPACTGXXC

SEQ ID NO: 5598 - protein, 17 aa, Artificial Sequence
  Synthetically generated peptide
  VARIANT (1)..(17): Xaa = Any Amino Acid
CCEFCCXNPACTGXXXC

SEQ ID NO: 5599 - protein, 14 aa, Artificial Sequence
  Synthetically generated peptide
  VARIANT (1)..(14): Xaa = Any Amino Acid
CCEFCCNXPACTGC

SEQ ID NO: 5600 - protein, 15 aa, Artificial Sequence
  Synthetically generated peptide
  VARIANT (1)..(15): Xaa = Any Amino Acid
CCEFCCNXXPACTGC

SEQ ID NO: 5601 - protein, 16 aa, Artificial Sequence
  Synthetically generated peptide
  VARIANT (1)..(16): Xaa = Any Amino Acid
CCEFCCNXXXPACTGC

SEQ ID NO: 5602 - protein, 17 aa, Artificial Sequence
  Synthetically generated peptide
  VARIANT (1)..(17): Xaa = Any Amino Acid
CCEFCCNXXXXPACTGC

SEQ ID NO: 5603 - protein, 17 aa, Artificial Sequence
  Synthetically generated peptide
  VARIANT (1)..(17): Xaa = Any Amino Acid
CCEFCCNXXXPXACTGC

SEQ ID NO: 5604 - protein, 17 aa, Artificial Sequence
  Synthetically generated peptide
  VARIANT (1)..(17): Xaa = Any Amino Acid
CCEFCCNXXXPAXCTGC

SEQ ID NO: 5605 - protein, 17 aa, Artificial Sequence
  Synthetically generated peptide
  VARIANT (1)..(17): Xaa = Any Amino Acid
CCEFCCNXXXPACXTGC

SEQ ID NO: 5606 - protein, 17 aa, Artificial Sequence
  Synthetically generated peptide
  VARIANT (1)..(17): Xaa = Any Amino Acid
CCEFCCNXXXPACTXGC

SEQ ID NO: 5607 - protein, 17 aa, Artificial Sequence
  Synthetically generated peptide
  VARIANT (1)..(17): Xaa = Any Amino Acid
CCEFCCNXXXPACTGXC

SEQ ID NO: 5608 - protein, 16 aa, Artificial Sequence
  Synthetically generated peptide
  VARIANT (1)..(16): Xaa = Any Amino Acid
CCEFCCNXXPXACTGC

SEQ ID NO: 5609 - protein, 17 aa, Artificial Sequence
  Synthetically generated peptide
  VARIANT (1)..(17): Xaa = Any Amino Acid
CCEFCCNXXPXXACTGC

SEQ ID NO: 5610 - protein, 17 aa, Artificial Sequence
  Synthetically generated peptide
  VARIANT (1)..(17): Xaa = Any Amino Acid
CCEFCCNXXPXAXCTGC

SEQ ID NO: 5611 - protein, 17 aa, Artificial Sequence
  Synthetically generated peptide
  VARIANT (1)..(17): Xaa = Any Amino Acid
CCEFCCNXXPXACXTGC

SEQ ID NO: 5612 - protein, 17 aa, Artificial Sequence
  Synthetically generated peptide
  VARIANT (1)..(17): Xaa = Any Amino Acid
CCEFCCNXXPXACTXGC

SEQ ID NO: 5613 - protein, 17 aa, Artificial Sequence
  Synthetically generated peptide
  VARIANT (1)..(17): Xaa = Any Amino Acid
CCEFCCNXXPXACTGXC

SEQ ID NO: 5614 - protein, 16 aa, Artificial Sequence
  Synthetically generated peptide
  VARIANT (1)..(16): Xaa = Any Amino Acid
CCEFCCNXXPAXCTGC

SEQ ID NO: 5615 - protein, 17 aa, Artificial Sequence
  Synthetically generated peptide
  VARIANT (1)..(17): Xaa = Any Amino Acid
CCEFCCNXXPAXXCTGC

SEQ ID NO: 5616 - protein, 17 aa, Artificial Sequence
  Synthetically generated peptide
  VARIANT (1)..(17): Xaa = Any Amino Acid
CCEFCCNXXPAXCXTGC

SEQ ID NO: 5617 - protein, 17 aa, Artificial Sequence
  Synthetically generated peptide
  VARIANT (1)..(17): Xaa = Any Amino Acid
CCEFCCNXXPAXCTXGC

SEQ ID NO: 5618 - protein, 17 aa, Artificial Sequence
  Synthetically generated peptide
  VARIANT (1)..(17): Xaa = Any Amino Acid
CCEFCCNXXPAXCTGXC

SEQ ID NO: 5619 - protein, 16 aa, Artificial Sequence
  Synthetically generated peptide
  VARIANT (1)..(16): Xaa = Any Amino Acid
CCEFCCNXXPACXTGC

SEQ ID NO: 5620 - protein, 17 aa, Artificial Sequence
  Synthetically generated peptide
  VARIANT (1)..(17): Xaa = Any Amino Acid
CCEFCCNXXPACXXTGC

SEQ ID NO: 5621 - protein, 17 aa, Artificial Sequence
  Synthetically generated peptide
  VARIANT (1)..(17): Xaa = Any Amino Acid
CCEFCCNXXPACXTXGC

SEQ ID NO: 5622 - protein, 17 aa, Artificial Sequence
  Synthetically generated peptide
  VARIANT (1)..(17): Xaa = Any Amino Acid
CCEFCCNXXPACXTGXC

SEQ ID NO: 5623 - protein, 16 aa, Artificial Sequence
  Synthetically generated peptide
  VARIANT (1)..(16): Xaa = Any Amino Acid
CCEFCCNXXPACTXGC

SEQ ID NO: 5624 - protein, 17 aa, Artificial Sequence
  Synthetically generated peptide
  VARIANT (1)..(17): Xaa = Any Amino Acid
CCEFCCNXXPACTXXGC

SEQ ID NO: 5625 - protein, 17 aa, Artificial Sequence
  Synthetically generated peptide
  VARIANT (1)..(17): Xaa = Any Amino Acid
CCEFCCNXXPACTXGXC

SEQ ID NO: 5626 - protein, 16 aa, Artificial Sequence
  Synthetically generated peptide
  VARIANT (1)..(16): Xaa = Any Amino Acid
CCEFCCNXXPACTGXC

SEQ ID NO: 5627 - protein, 17 aa, Artificial Sequence
  Synthetically generated peptide
  VARIANT (1)..(17): Xaa = Any Amino Acid
CCEFCCNXXPACTGXXC

SEQ ID NO: 5628 - protein, 15 aa, Artificial Sequence
  Synthetically generated peptide
  VARIANT (1)..(15): Xaa = Any Amino Acid
CCEFCCNXPXACTGC

SEQ ID NO: 5629 - protein, 16 aa, Artificial Sequence
  Synthetically generated peptide
  VARIANT (1)..(16): Xaa = Any Amino Acid
CCEFCCNXPXXACTGC

SEQ ID NO: 5630 - protein, 17 aa, Artificial Sequence
  Synthetically generated peptide
  VARIANT (1)..(17): Xaa = Any Amino Acid
CCEFCCNXPXXXACTGC

SEQ ID NO: 5631 - protein, 17 aa, Artificial Sequence
  Synthetically generated peptide
  VARIANT (1)..(17): Xaa = Any Amino Acid
CCEFCCNXPXXAXCTGC

SEQ ID NO: 5632 - protein, 17 aa, Artificial Sequence
  Synthetically generated peptide
  VARIANT (1)..(17): Xaa = Any Amino Acid
CCEFCCNXPXXACXTGC

SEQ ID NO: 5633 - protein, 17 aa, Artificial Sequence
  Synthetically generated peptide
  VARIANT (1)..(17): Xaa = Any Amino Acid
CCEFCCNXPXXACTXGC

SEQ ID NO: 5634 - protein, 17 aa, Artificial Sequence
  Synthetically generated peptide
  VARIANT (1)..(17): Xaa = Any Amino Acid
CCEFCCNXPXXACTGXC

SEQ ID NO: 5635 - protein, 16 aa, Artificial Sequence
  Synthetically generated peptide
  VARIANT (1)..(16): Xaa = Any Amino Acid
CCEFCCNXPXAXCTGC

SEQ ID NO: 5636 - protein, 17 aa, Artificial Sequence
  Synthetically generated peptide
  VARIANT (1)..(17): Xaa = Any Amino Acid
CCEFCCNXPXAXXCTGC

SEQ ID NO: 5637 - protein, 17 aa, Artificial Sequence
  Synthetically generated peptide
  VARIANT (1)..(17): Xaa = Any Amino Acid
CCEFCCNXPXAXCXTGC

SEQ ID NO: 5638 - protein, 17 aa, Artificial Sequence
  Synthetically generated peptide
  VARIANT (1)..(17): Xaa = Any Amino Acid
CCEFCCNXPXAXCTXGC

SEQ ID NO: 5639 - protein, 17 aa, Artificial Sequence
  Synthetically generated peptide
  VARIANT (1)..(17): Xaa = Any Amino Acid
CCEFCCNXPXAXCTGXC

SEQ ID NO: 5640 - protein, 16 aa, Artificial Sequence
  Synthetically generated peptide
  VARIANT (1)..(16): Xaa = Any Amino Acid
CCEFCCNXPXACXTGC

SEQ ID NO: 5641 - protein, 17 aa, Artificial Sequence
  Synthetically generated peptide
  VARIANT (1)..(17): Xaa = Any Amino Acid
CCEFCCNXPXACXXTGC

SEQ ID NO: 5642 - protein, 17 aa, Artificial Sequence
  Synthetically generated peptide
  VARIANT (1)..(17): Xaa = Any Amino Acid
CCEFCCNXPXACXTXGC

SEQ ID NO: 5643 - protein, 17 aa, Artificial Sequence
  Synthetically generated peptide
  VARIANT (1)..(17): Xaa = Any Amino Acid
CCEFCCNXPXACXTGXC

SEQ ID NO: 5644 - protein, 16 aa, Artificial Sequence
  Synthetically generated peptide
  VARIANT (1)..(16): Xaa = Any Amino Acid
CCEFCCNXPXACTXGC

SEQ ID NO: 5645 - protein, 17 aa, Artificial Sequence
  Synthetically generated peptide
  VARIANT (1)..(17): Xaa = Any Amino Acid
CCEFCCNXPXACTXXGC

SEQ ID NO: 5646 - protein, 17 aa, Artificial Sequence
  Synthetically generated peptide
  VARIANT (1)..(17): Xaa = Any Amino Acid
CCEFCCNXPXACTXGXC

SEQ ID NO: 5647 - protein, 16 aa, Artificial Sequence
  Synthetically generated peptide
  VARIANT (1)..(16): Xaa = Any Amino Acid
CCEFCCNXPXACTGXC

SEQ ID NO: 5648 - protein, 17 aa, Artificial Sequence
  Synthetically generated peptide
  VARIANT (1)..(17): Xaa = Any Amino Acid
CCEFCCNXPXACTGXXC

SEQ ID NO: 5649 - protein, 15 aa, Artificial Sequence
  Synthetically generated peptide
  VARIANT (1)..(15): Xaa = Any Amino Acid
CCEFCCNXPAXCTGC

SEQ ID NO: 5650 - protein, 16 aa, Artificial Sequence
  Synthetically generated peptide
  VARIANT (1)..(16): Xaa = Any Amino Acid
CCEFCCNXPAXXCTGC

SEQ ID NO: 5651 - protein, 17 aa, Artificial Sequence
  Synthetically generated peptide
  VARIANT (1)..(17): Xaa = Any Amino Acid
CCEFCCNXPAXXXCTGC

SEQ ID NO: 5652 - protein, 17 aa, Artificial Sequence
  Synthetically generated peptide
  VARIANT (1)..(17): Xaa = Any Amino Acid
CCEFCCNXPAXXCXTGC

SEQ ID NO: 5653 - protein, 17 aa, Artificial Sequence
  Synthetically generated peptide
  VARIANT (1)..(17): Xaa = Any Amino Acid
CCEFCCNXPAXXCTXGC

SEQ ID NO: 5654 - protein, 17 aa, Artificial Sequence
  Synthetically generated peptide
  VARIANT (1)..(17): Xaa = Any Amino Acid
CCEFCCNXPAXXCTGXC

SEQ ID NO: 5655 - protein, 16 aa, Artificial Sequence
  Synthetically generated peptide
  VARIANT (1)..(16): Xaa = Any Amino Acid
CCEFCCNXPAXCXTGC

SEQ ID NO: 5656 - protein, 17 aa, Artificial Sequence
  Synthetically generated peptide
  VARIANT (1)..(17): Xaa = Any Amino Acid
CCEFCCNXPAXCXXTGC

SEQ ID NO: 5657 - protein, 17 aa, Artificial Sequence
  Synthetically generated peptide
  VARIANT (1)..(17): Xaa = Any Amino Acid
CCEFCCNXPAXCXTXGC

SEQ ID NO: 5658 - protein, 17 aa, Artificial Sequence
  Synthetically generated peptide
  VARIANT (1)..(17): Xaa = Any Amino Acid
CCEFCCNXPAXCXTGXC

SEQ ID NO: 5659 - protein, 16 aa, Artificial Sequence
  Synthetically generated peptide
  VARIANT (1)..(16): Xaa = Any Amino Acid
CCEFCCNXPAXCTXGC

SEQ ID NO: 5660 - protein, 17 aa, Artificial Sequence
  Synthetically generated peptide
  VARIANT (1)..(17): Xaa = Any Amino Acid
CCEFCCNXPAXCTXXGC

SEQ ID NO: 5661 - protein, 17 aa, Artificial Sequence
  Synthetically generated peptide
  VARIANT (1)..(17): Xaa = Any Amino Acid
CCEFCCNXPAXCTXGXC

SEQ ID NO: 5662 - protein, 16 aa, Artificial Sequence
  Synthetically generated peptide
  VARIANT (1)..(16): Xaa = Any Amino Acid
CCEFCCNXPAXCTGXC

SEQ ID NO: 5663 - protein, 17 aa, Artificial Sequence
  Synthetically generated peptide
  VARIANT (1)..(17): Xaa = Any Amino Acid
CCEFCCNXPAXCTGXXC

SEQ ID NO: 5664 - protein, 15 aa, Artificial Sequence
  Synthetically generated peptide
  VARIANT (1)..(15): Xaa = Any Amino Acid
CCEFCCNXPACXTGC

SEQ ID NO: 5665 - protein, 16 aa, Artificial Sequence
  Synthetically generated peptide
  VARIANT (1)..(16): Xaa = Any Amino Acid
CCEFCCNXPACXXTGC

SEQ ID NO: 5666 - protein, 17 aa, Artificial Sequence
  Synthetically generated peptide
  VARIANT (1)..(17): Xaa = Any Amino Acid
CCEFCCNXPACXXXTGC

SEQ ID NO: 5667 - protein, 17 aa, Artificial Sequence
  Synthetically generated peptide
  VARIANT (1)..(17): Xaa = Any Amino Acid
CCEFCCNXPACXXTXGC

SEQ ID NO: 5668 - protein, 17 aa, Artificial Sequence
  Synthetically generated peptide
  VARIANT (1)..(17): Xaa = Any Amino Acid
CCEFCCNXPACXXTGXC

SEQ ID NO: 5669 - protein, 16 aa, Artificial Sequence
  Synthetically generated peptide
  VARIANT (1)..(16): Xaa = Any Amino Acid
CCEFCCNXPACXTXGC

SEQ ID NO: 5670 - protein, 17 aa, Artificial Sequence
  Synthetically generated peptide
  VARIANT (1)..(17): Xaa = Any Amino Acid
CCEFCCNXPACXTXXGC

SEQ ID NO: 5671 - protein, 17 aa, Artificial Sequence
  Synthetically generated peptide
  VARIANT (1)..(17): Xaa = Any Amino Acid
CCEFCCNXPACXTXGXC

SEQ ID NO: 5672 - protein, 16 aa, Artificial Sequence
  Synthetically generated peptide
  VARIANT (1)..(16): Xaa = Any Amino Acid
CCEFCCNXPACXTGXC

SEQ ID NO: 5673 - protein, 17 aa, Artificial Sequence
  Synthetically generated peptide
  VARIANT (1)..(17): Xaa = Any Amino Acid
CCEFCCNXPACXTGXXC

SEQ ID NO: 5674 - protein, 15 aa, Artificial Sequence
  Synthetically generated peptide
  VARIANT (1)..(15): Xaa = Any Amino Acid
CCEFCCNXPACTXGC

SEQ ID NO: 5675 - protein, 16 aa, Artificial Sequence
  Synthetically generated peptide
  VARIANT (1)..(16): Xaa = Any Amino Acid
CCEFCCNXPACTXXGC

SEQ ID NO: 5676 - protein, 17 aa, Artificial Sequence
  Synthetically generated peptide
  VARIANT (1)..(17): Xaa = Any Amino Acid
CCEFCCNXPACTXXXGC

SEQ ID NO: 5677 - protein, 17 aa, Artificial Sequence
  Synthetically generated peptide
  VARIANT (1)..(17): Xaa = Any Amino Acid
CCEFCCNXPACTXXGXC

SEQ ID NO: 5678 - protein, 16 aa, Artificial Sequence
  Synthetically generated peptide
  VARIANT (1)..(16): Xaa = Any Amino Acid
CCEFCCNXPACTXGXC

SEQ ID NO: 5679 - protein, 17 aa, Artificial Sequence
  Synthetically generated peptide
  VARIANT (1)..(17): Xaa = Any Amino Acid
CCEFCCNXPACTXGXXC

SEQ ID NO: 5680 - protein, 15 aa, Artificial Sequence
  Synthetically generated peptide
  VARIANT (1)..(15): Xaa = Any Amino Acid
CCEFCCNXPACTGXC

SEQ ID NO: 5681 - protein, 16 aa, Artificial Sequence
  Synthetically generated peptide
  VARIANT (1)..(16): Xaa = Any Amino Acid
CCEFCCNXPACTGXXC

SEQ ID NO: 5682 - protein, 17 aa, Artificial Sequence
  Synthetically generated peptide
  VARIANT (1)..(17): Xaa = Any Amino Acid
CCEFCCNXPACTGXXXC

SEQ ID NO: 5683 - protein, 14 aa, Artificial Sequence
  Synthetically generated peptide
  VARIANT (1)..(14): Xaa = Any Amino Acid
CCEFCCNPXACTGC

SEQ ID NO: 5684 - protein, 15 aa, Artificial Sequence
  Synthetically generated peptide
  VARIANT (1)..(15): Xaa = Any Amino Acid
CCEFCCNPXXACTGC

SEQ ID NO: 5685 - protein, 16 aa, Artificial Sequence
  Synthetically generated peptide
  VARIANT (1)..(16): Xaa = Any Amino Acid
CCEFCCNPXXXACTGC

SEQ ID NO: 5686 - protein, 17 aa, Artificial Sequence
  Synthetically generated peptide
  VARIANT (1)..(17): Xaa = Any Amino Acid
CCEFCCNPXXXXACTGC

SEQ ID NO: 5687 - protein, 17 aa, Artificial Sequence
  Synthetically generated peptide
  VARIANT (1)..(17): Xaa = Any Amino Acid
CCEFCCNPXXXAXCTGC

SEQ ID NO: 5688 - protein, 17 aa, Artificial Sequence
  Synthetically generated peptide
  VARIANT (1)..(17): Xaa = Any Amino Acid
CCEFCCNPXXXACXTGC

SEQ ID NO: 5689 - protein, 17 aa, Artificial Sequence
  Synthetically generated peptide
  VARIANT (1)..(17): Xaa = Any Amino Acid
CCEFCCNPXXXACTXGC

SEQ ID NO: 5690 - protein, 17 aa, Artificial Sequence
  Synthetically generated peptide
  VARIANT (1)..(17): Xaa = Any Amino Acid
CCEFCCNPXXXACTGXC

SEQ ID NO: 5691 - protein, 16 aa, Artificial Sequence
  Synthetically generated peptide
  VARIANT (1)..(16): Xaa = Any Amino Acid
CCEFCCNPXXAXCTGC

SEQ ID NO: 5692 - protein, 17 aa, Artificial Sequence
  Synthetically generated peptide
  VARIANT (1)..(17): Xaa = Any Amino Acid
CCEFCCNPXXAXXCTGC

SEQ ID NO: 5693 - protein, 17 aa, Artificial Sequence
  Synthetically generated peptide
  VARIANT (1)..(17): Xaa = Any Amino Acid
CCEFCCNPXXAXCXTGC

SEQ ID NO: 5694 - protein, 17 aa, Artificial Sequence
  Synthetically generated peptide
  VARIANT (1)..(17): Xaa = Any Amino Acid
CCEFCCNPXXAXCTXGC

SEQ ID NO: 5695 - protein, 17 aa, Artificial Sequence
  Synthetically generated peptide
  VARIANT (1)..(17): Xaa = Any Amino Acid
CCEFCCNPXXAXCTGXC

SEQ ID NO: 5696 - protein, 16 aa, Artificial Sequence
  Synthetically generated peptide
  VARIANT (1)..(16): Xaa = Any Amino Acid
CCEFCCNPXXACXTGC

SEQ ID NO: 5697 - protein, 17 aa, Artificial Sequence
  Synthetically generated peptide
  VARIANT (1)..(17): Xaa = Any Amino Acid
CCEFCCNPXXACXXTGC

SEQ ID NO: 5698 - protein, 17 aa, Artificial Sequence
  Synthetically generated peptide
  VARIANT (1)..(17): Xaa = Any Amino Acid
CCEFCCNPXXACXTXGC

SEQ ID NO: 5699 - protein, 17 aa, Artificial Sequence
  Synthetically generated peptide
  VARIANT (1)..(17): Xaa = Any Amino Acid
CCEFCCNPXXACXTGXC

SEQ ID NO: 5700 - protein, 16 aa, Artificial Sequence
  Synthetically generated peptide
  VARIANT (1)..(16): Xaa = Any Amino Acid
CCEFCCNPXXACTXGC

SEQ ID NO: 5701 - protein, 17 aa, Artificial Sequence
  Synthetically generated peptide
  VARIANT (1)..(17): Xaa = Any Amino Acid
CCEFCCNPXXACTXXGC

SEQ ID NO: 5702 - protein, 17 aa, Artificial Sequence
  Synthetically generated peptide
  VARIANT (1)..(17): Xaa = Any Amino Acid
CCEFCCNPXXACTXGXC

SEQ ID NO: 5703 - protein, 16 aa, Artificial Sequence
  Synthetically generated peptide
  VARIANT (1)..(16): Xaa = Any Amino Acid
CCEFCCNPXXACTGXC

SEQ ID NO: 5704 - protein, 17 aa, Artificial Sequence
  Synthetically generated peptide
  VARIANT (1)..(17): Xaa = Any Amino Acid
CCEFCCNPXXACTGXXC

SEQ ID NO: 5705 - protein, 15 aa, Artificial Sequence
  Synthetically generated peptide
  VARIANT (1)..(15): Xaa = Any Amino Acid
CCEFCCNPXAXCTGC

SEQ ID NO: 5706 - protein, 16 aa, Artificial Sequence
  Synthetically generated peptide
  VARIANT (1)..(16): Xaa = Any Amino Acid
CCEFCCNPXAXXCTGC

SEQ ID NO: 5707 - protein, 17 aa, Artificial Sequence
  Synthetically generated peptide
  VARIANT (1)..(17): Xaa = Any Amino Acid
CCEFCCNPXAXXXCTGC

SEQ ID NO: 5708 - protein, 17 aa, Artificial Sequence
  Synthetically generated peptide
  VARIANT (1)..(17): Xaa = Any Amino Acid
CCEFCCNPXAXXCXTGC

SEQ ID NO: 5709 - protein, 17 aa, Artificial Sequence
  Synthetically generated peptide
  VARIANT (1)..(17): Xaa = Any Amino Acid
CCEFCCNPXAXXCTXGC

SEQ ID NO: 5710 - protein, 17 aa, Artificial Sequence
  Synthetically generated peptide
  VARIANT (1)..(17): Xaa = Any Amino Acid
CCEFCCNPXAXXCTGXC

SEQ ID NO: 5711 - protein, 16 aa, Artificial Sequence
  Synthetically generated peptide
  VARIANT (1)..(16): Xaa = Any Amino Acid
CCEFCCNPXAXCXTGC

SEQ ID NO: 5712 - protein, 17 aa, Artificial Sequence
  Synthetically generated peptide
  VARIANT (1)..(17): Xaa = Any Amino Acid
CCEFCCNPXAXCXXTGC

SEQ ID NO: 5713 - protein, 17 aa, Artificial Sequence
  Synthetically generated peptide
  VARIANT (1)..(17): Xaa = Any Amino Acid
CCEFCCNPXAXCXTXGC

SEQ ID NO: 5714 - protein, 17 aa, Artificial Sequence
  Synthetically generated peptide
  VARIANT (1)..(17): Xaa = Any Amino Acid
CCEFCCNPXAXCXTGXC

SEQ ID NO: 5715 - protein, 16 aa, Artificial Sequence
  Synthetically generated peptide
  VARIANT (1)..(16): Xaa = Any Amino Acid
CCEFCCNPXAXCTXGC

SEQ ID NO: 5716 - protein, 17 aa, Artificial Sequence
  Synthetically generated peptide
  VARIANT (1)..(17): Xaa = Any Amino Acid
CCEFCCNPXAXCTXXGC

SEQ ID NO: 5717 - protein, 17 aa, Artificial Sequence
  Synthetically generated peptide
  VARIANT (1)..(17): Xaa = Any Amino Acid
CCEFCCNPXAXCTXGXC

SEQ ID NO: 5718 - protein, 16 aa, Artificial Sequence
  Synthetically generated peptide
  VARIANT (1)..(16): Xaa = Any Amino Acid
CCEFCCNPXAXCTGXC

SEQ ID NO: 5719 - protein, 17 aa, Artificial Sequence
  Synthetically generated peptide
  VARIANT (1)..(17): Xaa = Any Amino Acid
CCEFCCNPXAXCTGXXC

SEQ ID NO: 5720 - protein, 15 aa, Artificial Sequence
  Synthetically generated peptide
  VARIANT (1)..(15): Xaa = Any Amino Acid
CCEFCCNPXACXTGC

SEQ ID NO: 5721 - protein, 16 aa, Artificial Sequence
  Synthetically generated peptide
  VARIANT (1)..(16): Xaa = Any Amino Acid
CCEFCCNPXACXXTGC

SEQ ID NO: 5722 - protein, 17 aa, Artificial Sequence
  Synthetically generated peptide
  VARIANT (1)..(17): Xaa = Any Amino Acid
CCEFCCNPXACXXXTGC

SEQ ID NO: 5723 - protein, 17 aa, Artificial Sequence
  Synthetically generated peptide
  VARIANT (1)..(17): Xaa = Any Amino Acid
CCEFCCNPXACXXTXGC

SEQ ID NO: 5724 - protein, 17 aa, Artificial Sequence
  Synthetically generated peptide
  VARIANT (1)..(17): Xaa = Any Amino Acid
CCEFCCNPXACXXTGXC

SEQ ID NO: 5725 - protein, 16 aa, Artificial Sequence
  Synthetically generated peptide
  VARIANT (1)..(16): Xaa = Any Amino Acid
CCEFCCNPXACXTXGC

SEQ ID NO: 5726 - protein, 17 aa, Artificial Sequence
  Synthetically generated peptide
  VARIANT (1)..(17): Xaa = Any Amino Acid
CCEFCCNPXACXTXXGC

SEQ ID NO: 5727 - protein, 17 aa, Artificial Sequence
  Synthetically generated peptide
  VARIANT (1)..(17): Xaa = Any Amino Acid
CCEFCCNPXACXTXGXC

SEQ ID NO: 5728 - protein, 16 aa, Artificial Sequence
  Synthetically generated peptide
  VARIANT (1)..(16): Xaa = Any Amino Acid
CCEFCCNPXACXTGXC

SEQ ID NO: 5729 - protein, 17 aa, Artificial Sequence
  Synthetically generated peptide
  VARIANT (1)..(17): Xaa = Any Amino Acid
CCEFCCNPXACXTGXXC

SEQ ID NO: 5730 - protein, 15 aa, Artificial Sequence
  Synthetically generated peptide
  VARIANT (1)..(15): Xaa = Any Amino Acid
CCEFCCNPXACTXGC

SEQ ID NO: 5731 - protein, 16 aa, Artificial Sequence
  Synthetically generated peptide
  VARIANT (1)..(16): Xaa = Any Amino Acid
CCEFCCNPXACTXXGC

SEQ ID NO: 5732 - protein, 17 aa, Artificial Sequence
  Synthetically generated peptide
  VARIANT (1)..(17): Xaa = Any Amino Acid
CCEFCCNPXACTXXXGC

SEQ ID NO: 5733 - protein, 17 aa, Artificial Sequence
  Synthetically generated peptide
  VARIANT (1)..(17): Xaa = Any Amino Acid
CCEFCCNPXACTXXGXC

SEQ ID NO: 5734 - protein, 16 aa, Artificial Sequence
  Synthetically generated peptide
  VARIANT (1)..(16): Xaa = Any Amino Acid
CCEFCCNPXACTXGXC

SEQ ID NO: 5735 - protein, 17 aa, Artificial Sequence
  Synthetically generated peptide
  VARIANT (1)..(17): Xaa = Any Amino Acid
CCEFCCNPXACTXGXXC

SEQ ID NO: 5736 - protein, 15 aa, Artificial Sequence
  Synthetically generated peptide
  VARIANT (1)..(15): Xaa = Any Amino Acid
CCEFCCNPXACTGXC

SEQ ID NO: 5737 - protein, 16 aa, Artificial Sequence
  Synthetically generated peptide
  VARIANT (1)..(16): Xaa = Any Amino Acid
CCEFCCNPXACTGXXC

SEQ ID NO: 5738 - protein, 17 aa, Artificial Sequence
  Synthetically generated peptide
  VARIANT (1)..(17): Xaa = Any Amino Acid
CCEFCCNPXACTGXXXC

SEQ ID NO: 5739 - protein, 14 aa, Artificial Sequence
  Synthetically generated peptide
  VARIANT (1)..(14): Xaa = Any Amino Acid
CCEFCCNPAXCTGC

SEQ ID NO: 5740 - protein, 15 aa, Artificial Sequence
  Synthetically generated peptide
  VARIANT (1)..(15): Xaa = Any Amino Acid
CCEFCCNPAXXCTGC

SEQ ID NO: 5741 - protein, 16 aa, Artificial Sequence
  Synthetically generated peptide
  VARIANT (1)..(16): Xaa = Any Amino Acid
CCEFCCNPAXXXCTGC

SEQ ID NO: 5742 - protein, 17 aa, Artificial Sequence
  Synthetically generated peptide
  VARIANT (1)..(17): Xaa = Any Amino Acid
CCEFCCNPAXXXXCTGC

SEQ ID NO: 5743 - protein, 17 aa, Artificial Sequence
  Synthetically generated peptide
  VARIANT (1)..(17): Xaa = Any Amino Acid
CCEFCCNPAXXXCXTGC

SEQ ID NO: 5744 - protein, 17 aa, Artificial Sequence
  Synthetically generated peptide
  VARIANT (1)..(17): Xaa = Any Amino Acid
CCEFCCNPAXXXCTXGC

SEQ ID NO: 5745 - protein, 17 aa, Artificial Sequence
  Synthetically generated peptide
  VARIANT (1)..(17): Xaa = Any Amino Acid
CCEFCCNPAXXXCTGXC

SEQ ID NO: 5746 - protein, 16 aa, Artificial Sequence
  Synthetically generated peptide
  VARIANT (1)..(16): Xaa = Any Amino Acid
CCEFCCNPAXXCXTGC

SEQ ID NO: 5747 - protein, 17 aa, Artificial Sequence
  Synthetically generated peptide
  VARIANT (1)..(17): Xaa = Any Amino Acid
CCEFCCNPAXXCXXTGC

SEQ ID NO: 5748 - protein, 17 aa, Artificial Sequence
  Synthetically generated peptide
  VARIANT (1)..(17): Xaa = Any Amino Acid
CCEFCCNPAXXCXTXGC

SEQ ID NO: 5749 - protein, 17 aa, Artificial Sequence
  Synthetically generated peptide
  VARIANT (1)..(17): Xaa = Any Amino Acid
CCEFCCNPAXXCXTGXC

SEQ ID NO: 5750 - protein, 16 aa, Artificial Sequence
  Synthetically generated peptide
  VARIANT (1)..(16): Xaa = Any Amino Acid
CCEFCCNPAXXCTXGC

SEQ ID NO: 5751 - protein, 17 aa, Artificial Sequence
  Synthetically generated peptide
  VARIANT (1)..(17): Xaa = Any Amino Acid
CCEFCCNPAXXCTXXGC

SEQ ID NO: 5752 - protein, 17 aa, Artificial Sequence
  Synthetically generated peptide
  VARIANT (1)..(17): Xaa = Any Amino Acid
CCEFCCNPAXXCTXGXC

SEQ ID NO: 5753 - protein, 16 aa, Artificial Sequence
  Synthetically generated peptide
  VARIANT (1)..(16): Xaa = Any Amino Acid
CCEFCCNPAXXCTGXC

SEQ ID NO: 5754 - protein, 17 aa, Artificial Sequence
  Synthetically generated peptide
  VARIANT (1)..(17): Xaa = Any Amino Acid
CCEFCCNPAXXCTGXXC

SEQ ID NO: 5755 - protein, 15 aa, Artificial Sequence
  Synthetically generated peptide
  VARIANT (1)..(15): Xaa = Any Amino Acid
CCEFCCNPAXCXTGC

SEQ ID NO: 5756 - protein, 16 aa, Artificial Sequence
  Synthetically generated peptide
  VARIANT (1)..(16): Xaa = Any Amino Acid
CCEFCCNPAXCXXTGC

SEQ ID NO: 5757 - protein, 17 aa, Artificial Sequence
  Synthetically generated peptide
  VARIANT (1)..(17): Xaa = Any Amino Acid
CCEFCCNPAXCXXXTGC

SEQ ID NO: 5758 - protein, 17 aa, Artificial Sequence
  Synthetically generated peptide
  VARIANT (1)..(17): Xaa = Any Amino Acid
CCEFCCNPAXCXXTXGC

SEQ ID NO: 5759 - protein, 17 aa, Artificial Sequence
  Synthetically generated peptide
  VARIANT (1)..(17): Xaa = Any Amino Acid
CCEFCCNPAXCXXTGXC

SEQ ID NO: 5760 - protein, 16 aa, Artificial Sequence
  Synthetically generated peptide
  VARIANT (1)..(16): Xaa = Any Amino Acid
CCEFCCNPAXCXTXGC

SEQ ID NO: 5761 - protein, 17 aa, Artificial Sequence
  Synthetically generated peptide
  VARIANT (1)..(17): Xaa = Any Amino Acid
CCEFCCNPAXCXTXXGC

SEQ ID NO: 5762 - protein, 17 aa, Artificial Sequence
  Synthetically generated peptide
  VARIANT (1)..(17): Xaa = Any Amino Acid
CCEFCCNPAXCXTXGXC

SEQ ID NO: 5763 - protein, 16 aa, Artificial Sequence
  Synthetically generated peptide
  VARIANT (1)..(16): Xaa = Any Amino Acid
CCEFCCNPAXCXTGXC

SEQ ID NO: 5764 - protein, 17 aa, Artificial Sequence
  Synthetically generated peptide
  VARIANT (1)..(17): Xaa = Any Amino Acid
CCEFCCNPAXCXTGXXC

SEQ ID NO: 5765 - protein, 15 aa, Artificial Sequence
  Synthetically generated peptide
  VARIANT (1)..(15): Xaa = Any Amino Acid
CCEFCCNPAXCTXGC

SEQ ID NO: 5766 - protein, 16 aa, Artificial Sequence
  Synthetically generated peptide
  VARIANT (1)..(16): Xaa = Any Amino Acid
CCEFCCNPAXCTXXGC

SEQ ID NO: 5767 - protein, 17 aa, Artificial Sequence
  Synthetically generated peptide
  VARIANT (1)..(17): Xaa = Any Amino Acid
CCEFCCNPAXCTXXXGC

SEQ ID NO: 5768 - protein, 17 aa, Artificial Sequence
  Synthetically generated peptide
  VARIANT (1)..(17): Xaa = Any Amino Acid
CCEFCCNPAXCTXXGXC

SEQ ID NO: 5769 - protein, 16 aa, Artificial Sequence
  Synthetically generated peptide
  VARIANT (1)..(16): Xaa = Any Amino Acid
CCEFCCNPAXCTXGXC

SEQ ID NO: 5770 - protein, 17 aa, Artificial Sequence
  Synthetically generated peptide
  VARIANT (1)..(17): Xaa = Any Amino Acid
CCEFCCNPAXCTXGXXC

SEQ ID NO: 5771 - protein, 15 aa, Artificial Sequence
  Synthetically generated peptide
  VARIANT (1)..(15): Xaa = Any Amino Acid
CCEFCCNPAXCTGXC

SEQ ID NO: 5772 - protein, 16 aa, Artificial Sequence
  Synthetically generated peptide
  VARIANT (1)..(16): Xaa = Any Amino Acid
CCEFCCNPAXCTGXXC

SEQ ID NO: 5773 - protein, 17 aa, Artificial Sequence
  Synthetically generated peptide
  VARIANT (1)..(17): Xaa = Any Amino Acid
CCEFCCNPAXCTGXXXC

SEQ ID NO: 5774 - protein, 14 aa, Artificial Sequence
  Synthetically generated peptide
  VARIANT (1)..(14): Xaa = Any Amino Acid
CCEFCCNPACXTGC

SEQ ID NO: 5775 - protein, 15 aa, Artificial Sequence
  Synthetically generated peptide
  VARIANT (1)..(15): Xaa = Any Amino Acid
CCEFCCNPACXXTGC

SEQ ID NO: 5776 - protein, 16 aa, Artificial Sequence
  Synthetically generated peptide
  VARIANT (1)..(16): Xaa = Any Amino Acid
CCEFCCNPACXXXTGC

SEQ ID NO: 5777 - protein, 17 aa, Artificial Sequence
  Synthetically generated peptide
  VARIANT (1)..(17): Xaa = Any Amino Acid
CCEFCCNPACXXXXTGC

SEQ ID NO: 5778 - protein, 17 aa, Artificial Sequence
  Synthetically generated peptide
  VARIANT (1)..(17): Xaa = Any Amino Acid
CCEFCCNPACXXXTXGC

SEQ ID NO: 5779 - protein, 17 aa, Artificial Sequence
  Synthetically generated peptide
  VARIANT (1)..(17): Xaa = Any Amino Acid
CCEFCCNPACXXXTGXC

SEQ ID NO: 5780 - protein, 16 aa, Artificial Sequence
  Synthetically generated peptide
  VARIANT (1)..(16): Xaa = Any Amino Acid
CCEFCCNPACXXTXGC

SEQ ID NO: 5781 - protein, 17 aa, Artificial Sequence
  Synthetically generated peptide
  VARIANT (1)..(17): Xaa = Any Amino Acid
CCEFCCNPACXXTXXGC

SEQ ID NO: 5782 - protein, 17 aa, Artificial Sequence
  Synthetically generated peptide
  VARIANT (1)..(17): Xaa = Any Amino Acid
CCEFCCNPACXXTXGXC

SEQ ID NO: 5783 - protein, 16 aa, Artificial Sequence
  Synthetically generated peptide
  VARIANT (1)..(16): Xaa = Any Amino Acid
CCEFCCNPACXXTGXC

SEQ ID NO: 5784 - protein, 17 aa, Artificial Sequence
  Synthetically generated peptide
  VARIANT (1)..(17): Xaa = Any Amino Acid
CCEFCCNPACXXTGXXC

SEQ ID NO: 5785 - protein, 15 aa, Artificial Sequence
  Synthetically generated peptide
  VARIANT (1)..(15): Xaa = Any Amino Acid
CCEFCCNPACXTXGC

SEQ ID NO: 5786 - protein, 16 aa, Artificial Sequence
  Synthetically generated peptide
  VARIANT (1)..(16): Xaa = Any Amino Acid
CCEFCCNPACXTXXGC

SEQ ID NO: 5787 - protein, 17 aa, Artificial Sequence
  Synthetically generated peptide
  VARIANT (1)..(17): Xaa = Any Amino Acid
CCEFCCNPACXTXXXGC

SEQ ID NO: 5788 - protein, 17 aa, Artificial Sequence
  Synthetically generated peptide
  VARIANT (1)..(17): Xaa = Any Amino Acid
CCEFCCNPACXTXXGXC

SEQ ID NO: 5789 - protein, 16 aa, Artificial Sequence
  Synthetically generated peptide
  VARIANT (1)..(16): Xaa = Any Amino Acid
CCEFCCNPACXTXGXC

SEQ ID NO: 5790 - protein, 17 aa, Artificial Sequence
  Synthetically generated peptide
  VARIANT (1)..(17): Xaa = Any Amino Acid
CCEFCCNPACXTXGXXC

SEQ ID NO: 5791 - protein, 15 aa, Artificial Sequence
  Synthetically generated peptide
  VARIANT (1)..(15): Xaa = Any Amino Acid
CCEFCCNPACXTGXC

SEQ ID NO: 5792 - protein, 16 aa, Artificial Sequence
  Synthetically generated peptide
  VARIANT (1)..(16): Xaa = Any Amino Acid
CCEFCCNPACXTGXXC

SEQ ID NO: 5793 - protein, 17 aa, Artificial Sequence
  Synthetically generated peptide
  VARIANT (1)..(17): Xaa = Any Amino Acid
CCEFCCNPACXTGXXXC

SEQ ID NO: 5794 - protein, 14 aa, Artificial Sequence
  Synthetically generated peptide
  VARIANT (1)..(14): Xaa = Any Amino Acid
CCEFCCNPACTXGC

SEQ ID NO: 5795 - protein, 15 aa, Artificial Sequence
  Synthetically generated peptide
  VARIANT (1)..(15): Xaa = Any Amino Acid
CCEFCCNPACTXXGC

SEQ ID NO: 5796 - protein, 16 aa, Artificial Sequence
  Synthetically generated peptide
  VARIANT (1)..(16): Xaa = Any Amino Acid
CCEFCCNPACTXXXGC

SEQ ID NO: 5797 - protein, 17 aa, Artificial Sequence
  Synthetically generated peptide
  VARIANT (1)..(17): Xaa = Any Amino Acid
CCEFCCNPACTXXXXGC

SEQ ID NO: 5798 - protein, 17 aa, Artificial Sequence
  Synthetically generated peptide
  VARIANT (1)..(17): Xaa = Any Amino Acid
CCEFCCNPACTXXXGXC

SEQ ID NO: 5799 - protein, 16 aa, Artificial Sequence
  Synthetically generated peptide
  VARIANT (1)..(16): Xaa = Any Amino Acid
CCEFCCNPACTXXGXC

SEQ ID NO: 5800 - protein, 17 aa, Artificial Sequence
  Synthetically generated peptide
  VARIANT (1)..(17): Xaa = Any Amino Acid
CCEFCCNPACTXXGXXC

SEQ ID NO: 5801 - protein, 15 aa, Artificial Sequence
  Synthetically generated peptide
  VARIANT (1)..(15): Xaa = Any Amino Acid
CCEFCCNPACTXGXC

SEQ ID NO: 5802 - protein, 16 aa, Artificial Sequence
  Synthetically generated peptide
  VARIANT (1)..(16): Xaa = Any Amino Acid
CCEFCCNPACTXGXXC

SEQ ID NO: 5803 - protein, 17 aa, Artificial Sequence
  Synthetically generated peptide
  VARIANT (1)..(17): Xaa = Any Amino Acid
CCEFCCNPACTXGXXXC

SEQ ID NO: 5804 - protein, 14 aa, Artificial Sequence
  Synthetically generated peptide
  VARIANT (1)..(14): Xaa = Any Amino Acid
CCEFCCNPACTGXC

SEQ ID NO: 5805 - protein, 15 aa, Artificial Sequence
  Synthetically generated peptide
  VARIANT (1)..(15): Xaa = Any Amino Acid
CCEFCCNPACTGXXC

SEQ ID NO: 5806 - protein, 16 aa, Artificial Sequence
  Synthetically generated peptide
  VARIANT (1)..(16): Xaa = Any Amino Acid
CCEFCCNPACTGXXXC

SEQ ID NO: 5807 - protein, 17 aa, Artificial Sequence
  Synthetically generated peptide
  VARIANT (1)..(17): Xaa = Any Amino Acid
CCEFCCNPACTGXXXXC

SEQ ID NO: 5808 - protein, 13 aa, Artificial Sequence
  Synthetically generated peptide
ACELCANPACTGC

SEQ ID NO: 5809 - protein, 12 aa, Artificial Sequence
  Synthetically generated peptide
ACLCANPACTGC

SEQ ID NO: 5810 - protein, 11 aa, Artificial Sequence
  Synthetically generated peptide
ACCANPACTGC

SEQ ID NO: 5811 - protein, 11 aa, Artificial Sequence
  Synthetically generated peptide
ACLCAPACTGC

SEQ ID NO: 5812 - protein, 11 aa, Artificial Sequence
  Synthetically generated peptide
ACLCANACTGC

SEQ ID NO: 5813 - protein, 11 aa, Artificial Sequence
  Synthetically generated peptide
ACLCANPCTGC

SEQ ID NO: 5814 - protein, 11 aa, Artificial Sequence
  Synthetically generated peptide
ACLCANPACGC

SEQ ID NO: 5815 - protein, 11 aa, Artificial Sequence
  Synthetically generated peptide
ACLCANPACTC

SEQ ID NO: 5816 - protein, 12 aa, Artificial Sequence
  Synthetically generated peptide
ACECANPACTGC

SEQ ID NO: 5817 - protein, 11 aa, Artificial Sequence
  Synthetically generated peptide
ACECAPACTGC

SEQ ID NO: 5818 - protein, 11 aa, Artificial Sequence
  Synthetically generated peptide
ACECANACTGC

SEQ ID NO: 5819 - protein, 11 aa, Artificial Sequence
  Synthetically generated peptide
ACECANPCTGC

SEQ ID NO: 5820 - protein, 11 aa, Artificial Sequence
  Synthetically generated peptide
ACECANPACGC

SEQ ID NO: 5821 - protein, 11 aa, Artificial Sequence
  Synthetically generated peptide
ACECANPACTC

SEQ ID NO: 5822 - protein, 12 aa, Artificial Sequence
  Synthetically generated peptide
ACELCAPACTGC

SEQ ID NO: 5823 - protein, 11 aa, Artificial Sequence
  Synthetically generated peptide
ACELCAACTGC

SEQ ID NO: 5824 - protein, 11 aa, Artificial Sequence
  Synthetically generated peptide
ACELCAPCTGC

SEQ ID NO: 5825 - protein, 11 aa, Artificial Sequence
  Synthetically generated peptide
ACELCAPACGC

SEQ ID NO: 5826 - protein, 11 aa, Artificial Sequence
  Synthetically generated peptide
ACELCAPACTC

SEQ ID NO: 5827 - protein, 12 aa, Artificial Sequence
  Synthetically generated peptide
ACELCANACTGC

SEQ ID NO: 5828 - protein, 11 aa, Artificial Sequence
  Synthetically generated peptide
ACELCANCTGC

SEQ ID NO: 5829 - protein, 11 aa, Artificial Sequence
  Synthetically generated peptide
ACELCANACGC

SEQ ID NO: 5830 - protein, 11 aa, Artificial Sequence
  Synthetically generated peptide
ACELCANACTC

SEQ ID NO: 5831 - protein, 12 aa, Artificial Sequence
  Synthetically generated peptide
ACELCANPCTGC

SEQ ID NO: 5832 - protein, 11 aa, Artificial Sequence
  Synthetically generated peptide
ACELCANPCGC

SEQ ID NO: 5833 - protein, 11 aa, Artificial Sequence
  Synthetically generated peptide
ACELCANPCTC

SEQ ID NO: 5834 - protein, 12 aa, Artificial Sequence
  Synthetically generated peptide
ACELCANPACGC

SEQ ID NO: 5835 - protein, 11 aa, Artificial Sequence
  Synthetically generated peptide
ACELCANPACC

SEQ ID NO: 5836 - protein, 12 aa, Artificial Sequence
  Synthetically generated peptide
ACELCANPACTC

SEQ ID NO: 5837 - protein, 13 aa, Artificial Sequence
  Synthetically generated peptide
CCELACNPACTGA

SEQ ID NO: 5838 - protein, 12 aa, Artificial Sequence
  Synthetically generated peptide
CCLACNPACTGA

SEQ ID NO: 5839 - protein, 11 aa, Artificial Sequence
  Synthetically generated peptide
CCACNPACTGA

SEQ ID NO: 5840 - protein, 11 aa, Artificial Sequence
  Synthetically generated peptide
CCLACPACTGA

SEQ ID NO: 5841 - protein, 11 aa, Artificial Sequence
  Synthetically generated peptide
CCLACNACTGA

SEQ ID NO: 5842 - protein, 11 aa, Artificial Sequence
  Synthetically generated peptide
CCLACNPCTGA

SEQ ID NO: 5843 - protein, 11 aa, Artificial Sequence
  Synthetically generated peptide
CCLACNPACGA

SEQ ID NO: 5844 - protein, 11 aa, Artificial Sequence
  Synthetically generated peptide
CCLACNPACTA

SEQ ID NO: 5845 - protein, 12 aa, Artificial Sequence
  Synthetically generated peptide
CCEACNPACTGA

SEQ ID NO: 5846 - protein, 11 aa, Artificial Sequence
  Synthetically generated peptide
CCEACPACTGA

SEQ ID NO: 5847 - protein, 11 aa, Artificial Sequence
  Synthetically generated peptide
CCEACNACTGA

SEQ ID NO: 5848 - protein, 11 aa, Artificial Sequence
  Synthetically generated peptide
CCEACNPCTGA

SEQ ID NO: 5849 - protein, 11 aa, Artificial Sequence
  Synthetically generated peptide
CCEACNPACGA

SEQ ID NO: 5850 - protein, 11 aa, Artificial Sequence
  Synthetically generated peptide
CCEACNPACTA

SEQ ID NO: 5851 - protein, 12 aa, Artificial Sequence
  Synthetically generated peptide
CCELACPACTGA

SEQ ID NO: 5852 - protein, 11 aa, Artificial Sequence
  Synthetically generated peptide
CCELACACTGA

SEQ ID NO: 5853 - protein, 11 aa, Artificial Sequence
  Synthetically generated peptide
CCELACPCTGA

SEQ ID NO: 5854 - protein, 11 aa, Artificial Sequence
  Synthetically generated peptide
CCELACPACGA

SEQ ID NO: 5855 - protein, 11 aa, Artificial Sequence
  Synthetically generated peptide
CCELACPACTA

SEQ ID NO: 5856 - protein, 12 aa, Artificial Sequence
  Synthetically generated peptide
CCELACNACTGA

SEQ ID NO: 5857 - protein, 11 aa, Artificial Sequence
  Synthetically generated peptide
CCELACNCTGA

SEQ ID NO: 5858 - protein, 11 aa, Artificial Sequence
  Synthetically generated peptide
CCELACNACGA

SEQ ID NO: 5859 - protein, 11 aa, Artificial Sequence
  Synthetically generated peptide
CCELACNACTA

SEQ ID NO: 5860 - protein, 12 aa, Artificial Sequence
  Synthetically generated peptide
CCELACNPCTGA

SEQ ID NO: 5861 - protein, 11 aa, Artificial Sequence
  Synthetically generated peptide
CCELACNPCGA

SEQ ID NO: 5862 - protein, 11 aa, Artificial Sequence
  Synthetically generated peptide
CCELACNPCTA

SEQ ID NO: 5863 - protein, 12 aa, Artificial Sequence
  Synthetically generated peptide
CCELACNPACGA

SEQ ID NO: 5864 - protein, 11 aa, Artificial Sequence
  Synthetically generated peptide
CCELACNPACA

SEQ ID NO: 5865 - protein, 12 aa, Artificial Sequence
  Synthetically generated peptide
CCELACNPACTA

SEQ ID NO: 5866 - protein, 13 aa, Artificial Sequence
  Synthetically generated peptide
ACEYCANPACTGC

SEQ ID NO: 5867 - protein, 12 aa, Artificial Sequence
  Synthetically generated peptide
ACYCANPACTGC

SEQ ID NO: 5868 - protein, 11 aa, Artificial Sequence
  Synthetically generated peptide
ACCANPACTGC

SEQ ID NO: 5869 - protein, 11 aa, Artificial Sequence
  Synthetically generated peptide
ACYCAPACTGC

SEQ ID NO: 5870 - protein, 11 aa, Artificial Sequence
  Synthetically generated peptide
ACYCANACTGC

SEQ ID NO: 5871 - protein, 11 aa, Artificial Sequence
  Synthetically generated peptide
ACYCANPCTGC

SEQ ID NO: 5872 - protein, 11 aa, Artificial Sequence
  Synthetically generated peptide
ACYCANPACGC

SEQ ID NO: 5873 - protein, 11 aa, Artificial Sequence
  Synthetically generated peptide
ACYCANPACTC

SEQ ID NO: 5874 - protein, 12 aa, Artificial Sequence
  Synthetically generated peptide
ACECANPACTGC

SEQ ID NO: 5875 - protein, 11 aa, Artificial Sequence
  Synthetically generated peptide
ACECAPACTGC

SEQ ID NO: 5876 - protein, 11 aa, Artificial Sequence
  Synthetically generated peptide
ACECANACTGC

SEQ ID NO: 5877 - protein, 11 aa, Artificial Sequence
  Synthetically generated peptide
ACECANPCTGC

SEQ ID NO: 5878 - protein, 11 aa, Artificial Sequence
  Synthetically generated peptide
ACECANPACGC

SEQ ID NO: 5879 - protein, 11 aa, Artificial Sequence
  Synthetically generated peptide
ACECANPACTC

SEQ ID NO: 5880 - protein, 12 aa, Artificial Sequence
  Synthetically generated peptide
ACEYCAPACTGC

SEQ ID NO: 5881 - protein, 11 aa, Artificial Sequence
  Synthetically generated peptide
ACEYCAACTGC

SEQ ID NO: 5882 - protein, 11 aa, Artificial Sequence
  Synthetically generated peptide
ACEYCAPCTGC

SEQ ID NO: 5883 - protein, 11 aa, Artificial Sequence
  Synthetically generated peptide
ACEYCAPACGC

SEQ ID NO: 5884 - protein, 11 aa, Artificial Sequence
  Synthetically generated peptide
ACEYCAPACTC

SEQ ID NO: 5885 - protein, 12 aa, Artificial Sequence
  Synthetically generated peptide
ACEYCANACTGC

SEQ ID NO: 5886 - protein, 11 aa, Artificial Sequence
  Synthetically generated peptide
ACEYCANCTGC

SEQ ID NO: 5887 - protein, 11 aa, Artificial Sequence
  Synthetically generated peptide
ACEYCANACGC

SEQ ID NO: 5888 - protein, 11 aa, Artificial Sequence
  Synthetically generated peptide
ACEYCANACTC

SEQ ID NO: 5889 - protein, 12 aa, Artificial Sequence
  Synthetically generated peptide
ACEYCANPCTGC

SEQ ID NO: 5890 - protein, 11 aa, Artificial Sequence
  Synthetically generated peptide
ACEYCANPCGC

SEQ ID NO: 5891 - protein, 11 aa, Artificial Sequence
  Synthetically generated peptide
ACEYCANPCTC

SEQ ID NO: 5892 - protein, 12 aa, Artificial Sequence
  Synthetically generated peptide
ACEYCANPACGC

SEQ ID NO: 5893 - protein, 11 aa, Artificial Sequence
  Synthetically generated peptide
ACEYCANPACC

SEQ ID NO: 5894 - protein, 12 aa, Artificial Sequence
  Synthetically generated peptide
ACEYCANPACTC

SEQ ID NO: 5895 - protein, 13 aa, Artificial Sequence
  Synthetically generated peptide
CCEYACNPACTGA

SEQ ID NO: 5896 - protein, 12 aa, Artificial Sequence
  Synthetically generated peptide
CCYACNPACTGA

SEQ ID NO: 5897 - protein, 11 aa, Artificial Sequence
  Synthetically generated peptide
CCACNPACTGA

SEQ ID NO: 5898 - protein, 11 aa, Artificial Sequence
  Synthetically generated peptide
CCYACPACTGA

SEQ ID NO: 5899 - protein, 11 aa, Artificial Sequence
  Synthetically generated peptide
CCYACNACTGA

SEQ ID NO: 5900 - protein, 11 aa, Artificial Sequence
  Synthetically generated peptide
CCYACNPCTGA

SEQ ID NO: 5901 - protein, 11 aa, Artificial Sequence
  Synthetically generated peptide
CCYACNPACGA

SEQ ID NO: 5902 - protein, 11 aa, Artificial Sequence
  Synthetically generated peptide
CCYACNPACTA

SEQ ID NO: 5903 - protein, 12 aa, Artificial Sequence
  Synthetically generated peptide
CCEACNPACTGA

SEQ ID NO: 5904 - protein, 11 aa, Artificial Sequence
  Synthetically generated peptide
CCEACPACTGA

SEQ ID NO: 5905 - protein, 11 aa, Artificial Sequence
  Synthetically generated peptide
CCEACNACTGA

SEQ ID NO: 5906 - protein, 11 aa, Artificial Sequence
  Synthetically generated peptide
CCEACNPCTGA

SEQ ID NO: 5907 - protein, 11 aa, Artificial Sequence
  Synthetically generated peptide
CCEACNPACGA

SEQ ID NO: 5908 - protein, 11 aa, Artificial Sequence
  Synthetically generated peptide
CCEACNPACTA

SEQ ID NO: 5909 - protein, 12 aa, Artificial Sequence
  Synthetically generated peptide
CCEYACPACTGA

SEQ ID NO: 5910 - protein, 11 aa, Artificial Sequence
  Synthetically generated peptide
CCEYACACTGA

SEQ ID NO: 5911 - protein, 11 aa, Artificial Sequence
  Synthetically generated peptide
CCEYACPCTGA

SEQ ID NO: 5912 - protein, 11 aa, Artificial Sequence
  Synthetically generated peptide
CCEYACPACGA

SEQ ID NO: 5913 - protein, 11 aa, Artificial Sequence
  Synthetically generated peptide
CCEYACPACTA

SEQ ID NO: 5914 - protein, 12 aa, Artificial Sequence
  Synthetically generated peptide
CCEYACNACTGA

SEQ ID NO: 5915 - protein, 11 aa, Artificial Sequence
  Synthetically generated peptide
CCEYACNCTGA

SEQ ID NO: 5916 - protein, 11 aa, Artificial Sequence
  Synthetically generated peptide
CCEYACNACGA

SEQ ID NO: 5917 - protein, 11 aa, Artificial Sequence
  Synthetically generated peptide
CCEYACNACTA

SEQ ID NO: 5918 - protein, 12 aa, Artificial Sequence
  Synthetically generated peptide
CCEYACNPCTGA

SEQ ID NO: 5919 - protein, 11 aa, Artificial Sequence
  Synthetically generated peptide
CCEYACNPCGA

SEQ ID NO: 5920 - protein, 11 aa, Artificial Sequence
  Synthetically generated peptide
CCEYACNPCTA

SEQ ID NO: 5921 - protein, 12 aa, Artificial Sequence
  Synthetically generated peptide
CCEYACNPACGA

SEQ ID NO: 5922 - protein, 11 aa, Artificial Sequence
  Synthetically generated peptide
CCEYACNPACA

SEQ ID NO: 5923 - protein, 12 aa, Artificial Sequence
  Synthetically generated peptide
CCEYACNPACTA

SEQ ID NO: 5924 - protein, 13 aa, Artificial Sequence
  Synthetically generated peptide
ACEFCANPACTGC

SEQ ID NO: 5925 - protein, 12 aa, Artificial Sequence
  Synthetically generated peptide
ACFCANPACTGC

SEQ ID NO: 5926 - protein, 11 aa, Artificial Sequence
  Synthetically generated peptide
ACCANPACTGC

SEQ ID NO: 5927 - protein, 11 aa, Artificial Sequence
  Synthetically generated peptide
ACFCAPACTGC

SEQ ID NO: 5928 - protein, 11 aa, Artificial Sequence
  Synthetically generated peptide
ACFCANACTGC

SEQ ID NO: 5929 - protein, 11 aa, Artificial Sequence
  Synthetically generated peptide
ACFCANPCTGC

SEQ ID NO: 5930 - protein, 11 aa, Artificial Sequence
  Synthetically generated peptide
ACFCANPACGC

SEQ ID NO: 5931 - protein, 11 aa, Artificial Sequence
  Synthetically generated peptide
ACFCANPACTC

SEQ ID NO: 5932 - protein, 12 aa, Artificial Sequence
  Synthetically generated peptide
ACECANPACTGC

SEQ ID NO: 5933 - protein, 11 aa, Artificial Sequence
  Synthetically generated peptide
ACECAPACTGC

SEQ ID NO: 5934 - protein, 11 aa, Artificial Sequence
  Synthetically generated peptide
ACECANACTGC

SEQ ID NO: 5935 - protein, 11 aa, Artificial Sequence
  Synthetically generated peptide
ACECANPCTGC

SEQ ID NO: 5936 - protein, 11 aa, Artificial Sequence
  Synthetically generated peptide
ACECANPACGC

SEQ ID NO: 5937 - protein, 11 aa, Artificial Sequence
  Synthetically generated peptide
ACECANPACTC

SEQ ID NO: 5938 - protein, 12 aa, Artificial Sequence
  Synthetically generated peptide
ACEFCAPACTGC

SEQ ID NO: 5939 - protein, 11 aa, Artificial Sequence
  Synthetically generated peptide
ACEFCAACTGC

SEQ ID NO: 5940 - protein, 11 aa, Artificial Sequence
  Synthetically generated peptide
ACEFCAPCTGC

SEQ ID NO: 5941 - protein, 11 aa, Artificial Sequence
  Synthetically generated peptide
ACEFCAPACGC

SEQ ID NO: 5942 - protein, 11 aa, Artificial Sequence
  Synthetically generated peptide
ACEFCAPACTC

SEQ ID NO: 5943 - protein, 12 aa, Artificial Sequence
  Synthetically generated peptide
ACEFCANACTGC

SEQ ID NO: 5944 - protein, 11 aa, Artificial Sequence
  Synthetically generated peptide
ACEFCANCTGC

SEQ ID NO: 5945 - protein, 11 aa, Artificial Sequence
  Synthetically generated peptide
ACEFCANACGC

SEQ ID NO: 5946 - protein, 11 aa, Artificial Sequence
  Synthetically generated peptide
ACEFCANACTC

SEQ ID NO: 5947 - protein, 12 aa, Artificial Sequence
  Synthetically generated peptide
ACEFCANPCTGC

SEQ ID NO: 5948 - protein, 11 aa, Artificial Sequence
  Synthetically generated peptide
ACEFCANPCGC

SEQ ID NO: 5949 - protein, 11 aa, Artificial Sequence
  Synthetically generated peptide
ACEFCANPCTC

SEQ ID NO: 5950 - protein, 12 aa, Artificial Sequence
  Synthetically generated peptide
ACEFCANPACGC

SEQ ID NO: 5951 - protein, 11 aa, Artificial Sequence
  Synthetically generated peptide
ACEFCANPACC

SEQ ID NO: 5952 - protein, 12 aa, Artificial Sequence
  Synthetically generated peptide
ACEFCANPACTC

SEQ ID NO: 5953 - protein, 13 aa, Artificial Sequence
  Synthetically generated peptide
CCEFACNPACTGA

SEQ ID NO: 5954 - protein, 12 aa, Artificial Sequence
  Synthetically generated peptide
CCFACNPACTGA

SEQ ID NO: 5955 - protein, 11 aa, Artificial Sequence
  Synthetically generated peptide
CCACNPACTGA

SEQ ID NO: 5956 - protein, 11 aa, Artificial Sequence
  Synthetically generated peptide
CCFACPACTGA

SEQ ID NO: 5957 - protein, 11 aa, Artificial Sequence
  Synthetically generated peptide
CCFACNACTGA

SEQ ID NO: 5958 - protein, 11 aa, Artificial Sequence
  Synthetically generated peptide
CCFACNPCTGA

SEQ ID NO: 5959 - protein, 11 aa, Artificial Sequence
  Synthetically generated peptide
CCFACNPACGA

SEQ ID NO: 5960 - protein, 11 aa, Artificial Sequence
  Synthetically generated peptide
CCFACNPACTA

SEQ ID NO: 5961 - protein, 12 aa, Artificial Sequence
  Synthetically generated peptide
CCEACNPACTGA

SEQ ID NO: 5962 - protein, 11 aa, Artificial Sequence
  Synthetically generated peptide
CCEACPACTGA

SEQ ID NO: 5963 - protein, 11 aa, Artificial Sequence
  Synthetically generated peptide
CCEACNACTGA

SEQ ID NO: 5964 - protein, 11 aa, Artificial Sequence
  Synthetically generated peptide
CCEACNPCTGA

SEQ ID NO: 5965 - protein, 11 aa, Artificial Sequence
  Synthetically generated peptide
CCEACNPACGA

SEQ ID NO: 5966 - protein, 11 aa, Artificial Sequence
  Synthetically generated peptide
CCEACNPACTA

SEQ ID NO: 5967 - protein, 12 aa, Artificial Sequence
  Synthetically generated peptide
CCEFACPACTGA

SEQ ID NO: 5968 - protein, 11 aa, Artificial Sequence
  Synthetically generated peptide
CCEFACACTGA

SEQ ID NO: 5969 - protein, 11 aa, Artificial Sequence
  Synthetically generated peptide
CCEFACPCTGA

SEQ ID NO: 5970 - protein, 11 aa, Artificial Sequence
  Synthetically generated peptide
CCEFACPACGA

SEQ ID NO: 5971 - protein, 11 aa, Artificial Sequence
  Synthetically generated peptide
CCEFACPACTA

SEQ ID NO: 5972 - protein, 12 aa, Artificial Sequence
  Synthetically generated peptide
CCEFACNACTGA

SEQ ID NO: 5973 - protein, 11 aa, Artificial Sequence
  Synthetically generated peptide
CCEFACNCTGA

SEQ ID NO: 5974 - protein, 11 aa, Artificial Sequence
  Synthetically generated peptide
CCEFACNACGA

SEQ ID NO: 5975 - protein, 11 aa, Artificial Sequence
  Synthetically generated peptide
CCEFACNACTA

SEQ ID NO: 5976 - protein, 12 aa, Artificial Sequence
  Synthetically generated peptide
CCEFACNPCTGA

SEQ ID NO: 5977 - protein, 11 aa, Artificial Sequence
  Synthetically generated peptide
CCEFACNPCGA

SEQ ID NO: 5978 - protein, 11 aa, Artificial Sequence
  Synthetically generated peptide
CCEFACNPCTA

SEQ ID NO: 5979 - protein, 12 aa, Artificial Sequence
  Synthetically generated peptide
CCEFACNPACGA

SEQ ID NO: 5980 - protein, 11 aa, Artificial Sequence
  Synthetically generated peptide
CCEFACNPACA

SEQ ID NO: 5981 - protein, 12 aa, Artificial Sequence
  Synthetically generated peptide
CCEFACNPACTA

SEQ ID NO: 5982 - protein, 13 aa, Artificial Sequence
  Synthetically generated peptide
ACEWCANPACTGC

SEQ ID NO: 5983 - protein, 12 aa, Artificial Sequence
  Synthetically generated peptide
ACWCANPACTGC

SEQ ID NO: 5984 - protein, 11 aa, Artificial Sequence
  Synthetically generated peptide
ACCANPACTGC

SEQ ID NO: 5985 - protein, 11 aa, Artificial Sequence
  Synthetically generated peptide
ACWCAPACTGC

SEQ ID NO: 5986 - protein, 11 aa, Artificial Sequence
  Synthetically generated peptide
ACWCANACTGC

SEQ ID NO: 5987 - protein, 11 aa, Artificial Sequence
  Synthetically generated peptide
ACWCANPCTGC

SEQ ID NO: 5988 - protein, 11 aa, Artificial Sequence
  Synthetically generated peptide
ACWCANPACGC

SEQ ID NO: 5989 - protein, 11 aa, Artificial Sequence
  Synthetically generated peptide
ACWCANPACTC

SEQ ID NO: 5990 - protein, 12 aa, Artificial Sequence
  Synthetically generated peptide
ACECANPACTGC

SEQ ID NO: 5991 - protein, 11 aa, Artificial Sequence
  Synthetically generated peptide
ACECAPACTGC

SEQ ID NO: 5992 - protein, 11 aa, Artificial Sequence
  Synthetically generated peptide
ACECANACTGC

SEQ ID NO: 5993 - protein, 11 aa, Artificial Sequence
  Synthetically generated peptide
ACECANPCTGC

SEQ ID NO: 5994 - protein, 11 aa, Artificial Sequence
  Synthetically generated peptide
ACECANPACGC

SEQ ID NO: 5995 - protein, 11 aa, Artificial Sequence
  Synthetically generated peptide
ACECANPACTC

SEQ ID NO: 5996 - protein, 12 aa, Artificial Sequence
  Synthetically generated peptide
ACEWCAPACTGC

SEQ ID NO: 5997 - protein, 11 aa, Artificial Sequence
  Synthetically generated peptide
ACEWCAACTGC

SEQ ID NO: 5998 - protein, 11 aa, Artificial Sequence
  Synthetically generated peptide
ACEWCAPCTGC

SEQ ID NO: 5999 - protein, 11 aa, Artificial Sequence
  Synthetically generated peptide
ACEWCAPACGC

SEQ ID NO: 6000 - protein, 11 aa, Artificial Sequence
  Synthetically generated peptide
ACEWCAPACTC

SEQ ID NO: 6001 - protein, 12 aa, Artificial Sequence
  Synthetically generated peptide
ACEWCANACTGC

SEQ ID NO: 6002 - protein, 11 aa, Artificial Sequence
  Synthetically generated peptide
ACEWCANCTGC

SEQ ID NO: 6003 - protein, 11 aa, Artificial Sequence
  Synthetically generated peptide
ACEWCANACGC

SEQ ID NO: 6004 - protein, 11 aa, Artificial Sequence
  Synthetically generated peptide
ACEWCANACTC

SEQ ID NO: 6005 - protein, 12 aa, Artificial Sequence
  Synthetically generated peptide
ACEWCANPCTGC

SEQ ID NO: 6006 - protein, 11 aa, Artificial Sequence
  Synthetically generated peptide
ACEWCANPCGC

SEQ ID NO: 6007 - protein, 11 aa, Artificial Sequence
  Synthetically generated peptide
ACEWCANPCTC

SEQ ID NO: 6008 - protein, 12 aa, Artificial Sequence
  Synthetically generated peptide
ACEWCANPACGC

SEQ ID NO: 6009 - protein, 11 aa, Artificial Sequence
  Synthetically generated peptide
ACEWCANPACC

SEQ ID NO: 6010 - protein, 12 aa, Artificial Sequence
  Synthetically generated peptide
ACEWCANPACTC

SEQ ID NO: 6011 - protein, 13 aa, Artificial Sequence
  Synthetically generated peptide
CCEWACNPACTGA

SEQ ID NO: 6012 - protein, 12 aa, Artificial Sequence
  Synthetically generated peptide
ACLCANPACTGC

SEQ ID NO: 6013 - protein, 11 aa, Artificial Sequence
  Synthetically generated peptide
ACCANPACTGC

SEQ ID NO: 6014 - protein, 11 aa, Artificial Sequence
  Synthetically generated peptide
ACLCAPACTGC

SEQ ID NO: 6015 - protein, 11 aa, Artificial Sequence
  Synthetically generated peptide
ACLCANACTGC

SEQ ID NO: 6016 - protein, 11 aa, Artificial Sequence
  Synthetically generated peptide
ACLCANPCTGC

SEQ ID NO: 6017 - protein, 11 aa, Artificial Sequence
  Synthetically generated peptide
ACLCANPACGC

SEQ ID NO: 6018 - protein, 11 aa, Artificial Sequence
  Synthetically generated peptide
ACLCANPACTC

SEQ ID NO: 6019 - protein, 12 aa, Artificial Sequence
  Synthetically generated peptide
ACECANPACTGC

SEQ ID NO: 6020 - protein, 11 aa, Artificial Sequence
  Synthetically generated peptide
ACECAPACTGC

SEQ ID NO: 6021 - protein, 11 aa, Artificial Sequence
  Synthetically generated peptide
ACECANACTGC

SEQ ID NO: 6022 - protein, 11 aa, Artificial Sequence
  Synthetically generated peptide
ACECANPCTGC

SEQ ID NO: 6023 - protein, 11 aa, Artificial Sequence
  Synthetically generated peptide
ACECANPACGC

SEQ ID NO: 6024 - protein, 11 aa, Artificial Sequence
  Synthetically generated peptide
ACECANPACTC

SEQ ID NO: 6025 - protein, 12 aa, Artificial Sequence
  Synthetically generated peptide
ACELCAPACTGC

SEQ ID NO: 6026 - protein, 11 aa, Artificial Sequence
  Synthetically generated peptide
ACELCAACTGC

SEQ ID NO: 6027 - protein, 11 aa, Artificial Sequence
  Synthetically generated peptide
ACELCAPCTGC

SEQ ID NO: 6028 - protein, 11 aa, Artificial Sequence
  Synthetically generated peptide
ACELCAPACGC

SEQ ID NO: 6029 - protein, 11 aa, Artificial Sequence
  Synthetically generated peptide
ACELCAPACTC

SEQ ID NO: 6030 - protein, 12 aa, Artificial Sequence
  Synthetically generated peptide
ACELCANACTGC

SEQ ID NO: 6031 - protein, 11 aa, Artificial Sequence
  Synthetically generated peptide
ACELCANCTGC

SEQ ID NO: 6032 - protein, 11 aa, Artificial Sequence
  Synthetically generated peptide
ACELCANACGC

SEQ ID NO: 6033 - protein, 11 aa, Artificial Sequence
  Synthetically generated peptide
ACELCANACTC

SEQ ID NO: 6034 - protein, 12 aa, Artificial Sequence
  Synthetically generated peptide
ACELCANPCTGC

SEQ ID NO: 6035 - protein, 11 aa, Artificial Sequence
  Synthetically generated peptide
ACELCANPCGC

SEQ ID NO: 6036 - protein, 11 aa, Artificial Sequence
  Synthetically generated peptide
ACELCANPCTC

SEQ ID NO: 6037 - protein, 12 aa, Artificial Sequence
  Synthetically generated peptide
ACELCANPACGC

SEQ ID NO: 6038 - protein, 11 aa, Artificial Sequence
  Synthetically generated peptide
ACELCANPACC

SEQ ID NO: 6039 - protein, 12 aa, Artificial Sequence
  Synthetically generated peptide
ACELCANPACTC

SEQ ID NO: 6040 - protein, 13 aa, Artificial Sequence
  Synthetically generated peptide
CCELACNPACTGA

SEQ ID NO: 6041 - protein, 12 aa, Artificial Sequence
  Synthetically generated peptide
CCLACNPACTGA

SEQ ID NO: 6042 - protein, 11 aa, Artificial Sequence
  Synthetically generated peptide
CCACNPACTGA

SEQ ID NO: 6043 - protein, 11 aa, Artificial Sequence
  Synthetically generated peptide
CCLACPACTGA

SEQ ID NO: 6044 - protein, 11 aa, Artificial Sequence
  Synthetically generated peptide
CCLACNACTGA

SEQ ID NO: 6045 - protein, 11 aa, Artificial Sequence
  Synthetically generated peptide
CCLACNPCTGA

SEQ ID NO: 6046 - protein, 11 aa, Artificial Sequence
  Synthetically generated peptide
CCLACNPACGA

SEQ ID NO: 6047 - protein, 11 aa, Artificial Sequence
  Synthetically generated peptide
CCLACNPACTA

SEQ ID NO: 6048 - protein, 12 aa, Artificial Sequence
  Synthetically generated peptide
CCEACNPACTGA

SEQ ID NO: 6049 - protein, 11 aa, Artificial Sequence
  Synthetically generated peptide
CCEACPACTGA

SEQ ID NO: 6050 - protein, 11 aa, Artificial Sequence
  Synthetically generated peptide
CCEACNACTGA

SEQ ID NO: 6051 - protein, 11 aa, Artificial Sequence
  Synthetically generated peptide
CCEACNPCTGA

SEQ ID NO: 6052 - protein, 11 aa, Artificial Sequence
  Synthetically generated peptide
CCEACNPACGA

SEQ ID NO: 6053 - protein, 11 aa, Artificial Sequence
  Synthetically generated peptide
CCEACNPACTA

SEQ ID NO: 6054 - protein, 12 aa, Artificial Sequence
  Synthetically generated peptide
CCELACPACTGA

SEQ ID NO: 6055 - protein, 11 aa, Artificial Sequence
  Synthetically generated peptide
CCELACACTGA

SEQ ID NO: 6056 - protein, 11 aa, Artificial Sequence
  Synthetically generated peptide
CCELACPCTGA

SEQ ID NO: 6057 - protein, 11 aa, Artificial Sequence
  Synthetically generated peptide
CCELACPACGA

SEQ ID NO: 6058 - protein, 11 aa, Artificial Sequence
  Synthetically generated peptide
CCELACPACTA

SEQ ID NO: 6059 - protein, 12 aa, Artificial Sequence
  Synthetically generated peptide
CCELACNACTGA

SEQ ID NO: 6060 - protein, 11 aa, Artificial Sequence
  Synthetically generated peptide
CCELACNCTGA

SEQ ID NO: 6061 - protein, 11 aa, Artificial Sequence
  Synthetically generated peptide
CCELACNACGA

SEQ ID NO: 6062 - protein, 11 aa, Artificial Sequence
  Synthetically generated peptide
CCELACNACTA

SEQ ID NO: 6063 - protein, 12 aa, Artificial Sequence
  Synthetically generated peptide
CCELACNPCTGA

SEQ ID NO: 6064 - protein, 11 aa, Artificial Sequence
  Synthetically generated peptide
CCELACNPCGA

SEQ ID NO: 6065 - protein, 11 aa, Artificial Sequence
  Synthetically generated peptide
CCELACNPCTA

SEQ ID NO: 6066 - protein, 12 aa, Artificial Sequence
  Synthetically generated peptide
CCELACNPACGA

SEQ ID NO: 6067 - protein, 11 aa, Artificial Sequence
  Synthetically generated peptide
CCELACNPACA

SEQ ID NO: 6068 - protein, 12 aa, Artificial Sequence
  Synthetically generated peptide
CCELACNPACTA

SEQ ID NO: 6069 - protein, 13 aa, Artificial Sequence
  Synthetically generated peptide
ACEYCANPACTGC

SEQ ID NO: 6070 - protein, 12 aa, Artificial Sequence
  Synthetically generated peptide
ACYCANPACTGC

SEQ ID NO: 6071 - protein, 11 aa, Artificial Sequence
  Synthetically generated peptide
ACCANPACTGC

SEQ ID NO: 6072 - protein, 11 aa, Artificial Sequence
  Synthetically generated peptide
ACYCAPACTGC

SEQ ID NO: 6073 - protein, 11 aa, Artificial Sequence
  Synthetically generated peptide
ACYCANACTGC

SEQ ID NO: 6074 - protein, 11 aa, Artificial Sequence
  Synthetically generated peptide
ACYCANPCTGC

SEQ ID NO: 6075 - protein, 11 aa, Artificial Sequence
  Synthetically generated peptide
ACYCANPACGC

SEQ ID NO: 6076 - protein, 11 aa, Artificial Sequence
  Synthetically generated peptide
ACYCANPACTC

SEQ ID NO: 6077 - protein, 12 aa, Artificial Sequence
  Synthetically generated peptide
ACECANPACTGC

SEQ ID NO: 6078 - protein, 11 aa, Artificial Sequence
  Synthetically generated peptide
ACECAPACTGC

SEQ ID NO: 6079 - protein, 11 aa, Artificial Sequence
  Synthetically generated peptide
ACECANACTGC

SEQ ID NO: 6080 - protein, 11 aa, Artificial Sequence
  Synthetically generated peptide
ACECANPCTGC

SEQ ID NO: 6081 - protein, 11 aa, Artificial Sequence
  Synthetically generated peptide
ACECANPACGC

SEQ ID NO: 6082 - protein, 11 aa, Artificial Sequence
  Synthetically generated peptide
ACECANPACTC

SEQ ID NO: 6083 - protein, 12 aa, Artificial Sequence
  Synthetically generated peptide
ACEYCAPACTGC

SEQ ID NO: 6084 - protein, 11 aa, Artificial Sequence
  Synthetically generated peptide
ACEYCAACTGC

SEQ ID NO: 6085 - protein, 11 aa, Artificial Sequence
  Synthetically generated peptide
ACEYCAPCTGC

SEQ ID NO: 6086 - protein, 11 aa, Artificial Sequence
  Synthetically generated peptide
ACEYCAPACGC

SEQ ID NO: 6087 - protein, 11 aa, Artificial Sequence
  Synthetically generated peptide
ACEYCAPACTC

SEQ ID NO: 6088 - protein, 12 aa, Artificial Sequence
  Synthetically generated peptide
ACEYCANACTGC

SEQ ID NO: 6089 - protein, 11 aa, Artificial Sequence
  Synthetically generated peptide
ACEYCANCTGC

SEQ ID NO: 6090 - protein, 11 aa, Artificial Sequence
  Synthetically generated peptide
ACEYCANACGC

SEQ ID NO: 6091 - protein, 11 aa, Artificial Sequence
  Synthetically generated peptide
ACEYCANACTC

SEQ ID NO: 6092 - protein, 12 aa, Artificial Sequence
  Synthetically generated peptide
ACEYCANPCTGC

SEQ ID NO: 6093 - protein, 11 aa, Artificial Sequence
  Synthetically generated peptide
ACEYCANPCGC

SEQ ID NO: 6094 - protein, 11 aa, Artificial Sequence
  Synthetically generated peptide
ACEYCANPCTC

SEQ ID NO: 6095 - protein, 12 aa, Artificial Sequence
  Synthetically generated peptide
ACEYCANPACGC

SEQ ID NO: 6096 - protein, 11 aa, Artificial Sequence
  Synthetically generated peptide
ACEYCANPACC

SEQ ID NO: 6097 - protein, 12 aa, Artificial Sequence
  Synthetically generated peptide
ACEYCANPACTC

SEQ ID NO: 6098 - protein, 13 aa, Artificial Sequence
  Synthetically generated peptide
CCEYACNPACTGA

SEQ ID NO: 6099 - protein, 12 aa, Artificial Sequence
  Synthetically generated peptide
CCYACNPACTGA

SEQ ID NO: 6100 - protein, 11 aa, Artificial Sequence
  Synthetically generated peptide
CCACNPACTGA

SEQ ID NO: 6101 - protein, 11 aa, Artificial Sequence
  Synthetically generated peptide
CCYACPACTGA

SEQ ID NO: 6102 - protein, 11 aa, Artificial Sequence
  Synthetically generated peptide
CCYACNACTGA

SEQ ID NO: 6103 - protein, 11 aa, Artificial Sequence
  Synthetically generated peptide
CCYACNPCTGA

SEQ ID NO: 6104 - protein, 11 aa, Artificial Sequence
  Synthetically generated peptide
CCYACNPACGA

SEQ ID NO: 6105 - protein, 11 aa, Artificial Sequence
  Synthetically generated peptide
CCYACNPACTA

SEQ ID NO: 6106 - protein, 12 aa, Artificial Sequence
  Synthetically generated peptide
CCEACNPACTGA

SEQ ID NO: 6107 - protein, 11 aa, Artificial Sequence
  Synthetically generated peptide
CCEACPACTGA

SEQ ID NO: 6108 - protein, 11 aa, Artificial Sequence
  Synthetically generated peptide
CCEACNACTGA

SEQ ID NO: 6109 - protein, 11 aa, Artificial Sequence
  Synthetically generated peptide
CCEACNPCTGA

SEQ ID NO: 6110 - protein, 11 aa, Artificial Sequence
  Synthetically generated peptide
CCEACNPACGA

SEQ ID NO: 6111 - protein, 11 aa, Artificial Sequence
  Synthetically generated peptide
CCEACNPACTA

SEQ ID NO: 6112 - protein, 12 aa, Artificial Sequence
  Synthetically generated peptide
CCEYACPACTGA

SEQ ID NO: 6113 - protein, 11 aa, Artificial Sequence
  Synthetically generated peptide
CCEYACACTGA

SEQ ID NO: 6114 - protein, 11 aa, Artificial Sequence
  Synthetically generated peptide
CCEYACPCTGA

SEQ ID NO: 6115 - protein, 11 aa, Artificial Sequence
  Synthetically generated peptide
CCEYACPACGA

SEQ ID NO: 6116 - protein, 11 aa, Artificial Sequence
  Synthetically generated peptide
CCEYACPACTA

SEQ ID NO: 6117 - protein, 12 aa, Artificial Sequence
  Synthetically generated peptide
CCEYACNACTGA

SEQ ID NO: 6118 - protein, 11 aa, Artificial Sequence
  Synthetically generated peptide
CCEYACNCTGA

SEQ ID NO: 6119 - protein, 11 aa, Artificial Sequence
  Synthetically generated peptide
CCEYACNACGA

SEQ ID NO: 6120 - protein, 11 aa, Artificial Sequence
  Synthetically generated peptide
CCEYACNACTA

SEQ ID NO: 6121 - protein, 12 aa, Artificial Sequence
  Synthetically generated peptide
CCEYACNPCTGA

SEQ ID NO: 6122 - protein, 11 aa, Artificial Sequence
  Synthetically generated peptide
CCEYACNPCGA

SEQ ID NO: 6123 - protein, 11 aa, Artificial Sequence
  Synthetically generated peptide
CCEYACNPCTA

SEQ ID NO: 6124 - protein, 12 aa, Artificial Sequence
  Synthetically generated peptide
CCEYACNPACGA

SEQ ID NO: 6125 - protein, 11 aa, Artificial Sequence
  Synthetically generated peptide
CCEYACNPACA

SEQ ID NO: 6126 - protein, 12 aa, Artificial Sequence
  Synthetically generated peptide
CCEYACNPACTA

SEQ ID NO: 6127 - protein, 13 aa, Artificial Sequence
  Synthetically generated peptide
ACEFCANPACTGC

SEQ ID NO: 6128 - protein, 12 aa, Artificial Sequence
  Synthetically generated peptide
ACFCANPACTGC

SEQ ID NO: 6129 - protein, 11 aa, Artificial Sequence
  Synthetically generated peptide
ACCANPACTGC

SEQ ID NO: 6130 - protein, 11 aa, Artificial Sequence
  Synthetically generated peptide
ACFCAPACTGC

SEQ ID NO: 6131 - protein, 11 aa, Artificial Sequence
  Synthetically generated peptide
ACFCANACTGC

SEQ ID NO: 6132 - protein, 11 aa, Artificial Sequence
  Synthetically generated peptide
ACFCANPCTGC

SEQ ID NO: 6133 - protein, 11 aa, Artificial Sequence
  Synthetically generated peptide
ACFCANPACGC

SEQ ID NO: 6134 - protein, 11 aa, Artificial Sequence
  Synthetically generated peptide
ACFCANPACTC

SEQ ID NO: 6135 - protein, 12 aa, Artificial Sequence
  Synthetically generated peptide
ACECANPACTGC

SEQ ID NO: 6136 - protein, 11 aa, Artificial Sequence
  Synthetically generated peptide
ACECAPACTGC

SEQ ID NO: 6137 - protein, 11 aa, Artificial Sequence
  Synthetically generated peptide
ACECANACTGC

SEQ ID NO: 6138 - protein, 11 aa, Artificial Sequence
  Synthetically generated peptide
ACECANPCTGC

SEQ ID NO: 6139 - protein, 11 aa, Artificial Sequence
  Synthetically generated peptide
ACECANPACGC

SEQ ID NO: 6140 - protein, 11 aa, Artificial Sequence
  Synthetically generated peptide
ACECANPACTC

SEQ ID NO: 6141 - protein, 12 aa, Artificial Sequence
  Synthetically generated peptide
ACEFCAPACTGC

SEQ ID NO: 6142 - protein, 11 aa, Artificial Sequence
  Synthetically generated peptide
ACEFCAACTGC

SEQ ID NO: 6143 - protein, 11 aa, Artificial Sequence
  Synthetically generated peptide
ACEFCAPCTGC

SEQ ID NO: 6144 - protein, 11 aa, Artificial Sequence
  Synthetically generated peptide
ACEFCAPACGC

SEQ ID NO: 6145 - protein, 11 aa, Artificial Sequence
  Synthetically generated peptide
ACEFCAPACTC

SEQ ID NO: 6146 - protein, 12 aa, Artificial Sequence
  Synthetically generated peptide
ACEFCANACTGC

SEQ ID NO: 6147 - protein, 11 aa, Artificial Sequence
  Synthetically generated peptide
ACEFCANCTGC

SEQ ID NO: 6148 - protein, 11 aa, Artificial Sequence
  Synthetically generated peptide
ACEFCANACGC

SEQ ID NO: 6149 - protein, 11 aa, Artificial Sequence
  Synthetically generated peptide
ACEFCANACTC

SEQ ID NO: 6150 - protein, 12 aa, Artificial Sequence
  Synthetically generated peptide
ACEFCANPCTGC

SEQ ID NO: 6151 - protein, 11 aa, Artificial Sequence
  Synthetically generated peptide
ACEFCANPCGC

SEQ ID NO: 6152 - protein, 11 aa, Artificial Sequence
  Synthetically generated peptide
ACEFCANPCTC

SEQ ID NO: 6153 - protein, 12 aa, Artificial Sequence
  Synthetically generated peptide
ACEFCANPACGC

SEQ ID NO: 6154 - protein, 11 aa, Artificial Sequence
  Synthetically generated peptide
ACEFCANPACC

SEQ ID NO: 6155 - protein, 12 aa, Artificial Sequence
  Synthetically generated peptide
ACEFCANPACTC

SEQ ID NO: 6156 - protein, 13 aa, Artificial Sequence
  Synthetically generated peptide
CCEFACNPACTGA

SEQ ID NO: 6157 - protein, 12 aa, Artificial Sequence
  Synthetically generated peptide
CCFACNPACTGA

SEQ ID NO: 6158 - protein, 11 aa, Artificial Sequence
  Synthetically generated peptide
CCACNPACTGA

SEQ ID NO: 6159 - protein, 11 aa, Artificial Sequence
  Synthetically generated peptide
CCFACPACTGA

SEQ ID NO: 6160 - protein, 11 aa, Artificial Sequence
  Synthetically generated peptide
CCFACNACTGA

SEQ ID NO: 6161 - protein, 11 aa, Artificial Sequence
  Synthetically generated peptide
CCFACNPCTGA

SEQ ID NO: 6162 - protein, 11 aa, Artificial Sequence
  Synthetically generated peptide
CCFACNPACGA

SEQ ID NO: 6163 - protein, 11 aa, Artificial Sequence
  Synthetically generated peptide
CCFACNPACTA

SEQ ID NO: 6164 - protein, 12 aa, Artificial Sequence
  Synthetically generated peptide
CCEACNPACTGA

SEQ ID NO: 6165 - protein, 11 aa, Artificial Sequence
  Synthetically generated peptide
CCEACPACTGA

SEQ ID NO: 6166 - protein, 11 aa, Artificial Sequence
  Synthetically generated peptide
CCEACNACTGA

SEQ ID NO: 6167 - protein, 11 aa, Artificial Sequence
  Synthetically generated peptide
CCEACNPCTGA

SEQ ID NO: 6168 - protein, 11 aa, Artificial Sequence
  Synthetically generated peptide
CCEACNPACGA

SEQ ID NO: 6169 - protein, 11 aa, Artificial Sequence
  Synthetically generated peptide
CCEACNPACTA

SEQ ID NO: 6170 - protein, 12 aa, Artificial Sequence
  Synthetically generated peptide
CCEFACPACTGA

SEQ ID NO: 6171 - protein, 11 aa, Artificial Sequence
  Synthetically generated peptide
CCEFACACTGA

SEQ ID NO: 6172 - protein, 11 aa, Artificial Sequence
  Synthetically generated peptide
CCEFACPCTGA

SEQ ID NO: 6173 - protein, 11 aa, Artificial Sequence
  Synthetically generated peptide
CCEFACPACGA

SEQ ID NO: 6174 - protein, 11 aa, Artificial Sequence
  Synthetically generated peptide
CCEFACPACTA

SEQ ID NO: 6175 - protein, 12 aa, Artificial Sequence
  Synthetically generated peptide
CCEFACNACTGA

SEQ ID NO: 6176 - protein, 11 aa, Artificial Sequence
  Synthetically generated peptide
CCEFACNCTGA

SEQ ID NO: 6177 - protein, 11 aa, Artificial Sequence
  Synthetically generated peptide
CCEFACNACGA

SEQ ID NO: 6178 - protein, 11 aa, Artificial Sequence
  Synthetically generated peptide
CCEFACNACTA

SEQ ID NO: 6179 - protein, 12 aa, Artificial Sequence
  Synthetically generated peptide
CCEFACNPCTGA

SEQ ID NO: 6180 - protein, 11 aa, Artificial Sequence
  Synthetically generated peptide
CCEFACNPCGA

SEQ ID NO: 6181 - protein, 11 aa, Artificial Sequence
  Synthetically generated peptide
CCEFACNPCTA

SEQ ID NO: 6182 - protein, 12 aa, Artificial Sequence
  Synthetically generated peptide
CCEFACNPACGA

SEQ ID NO: 6183 - protein, 11 aa, Artificial Sequence
  Synthetically generated peptide
CCEFACNPACA

SEQ ID NO: 6184 - protein, 12 aa, Artificial Sequence
  Synthetically generated peptide
CCEFACNPACTA

SEQ ID NO: 6185 - protein, 13 aa, Artificial Sequence
  Synthetically generated peptide
ACEWCANPACTGC

SEQ ID NO: 6186 - protein, 12 aa, Artificial Sequence
  Synthetically generated peptide
ACWCANPACTGC

SEQ ID NO: 6187 - protein, 11 aa, Artificial Sequence
  Synthetically generated peptide
ACCANPACTGC

SEQ ID NO: 6188 - protein, 11 aa, Artificial Sequence
  Synthetically generated peptide
ACWCAPACTGC

SEQ ID NO: 6189 - protein, 11 aa, Artificial Sequence
  Synthetically generated peptide
ACWCANACTGC

SEQ ID NO: 6190 - protein, 11 aa, Artificial Sequence
  Synthetically generated peptide
ACWCANPCTGC

SEQ ID NO: 6191 - protein, 11 aa, Artificial Sequence
  Synthetically generated peptide
ACWCANPACGC

SEQ ID NO: 6192 - protein, 11 aa, Artificial Sequence
  Synthetically generated peptide
ACWCANPACTC

SEQ ID NO: 6193 - protein, 12 aa, Artificial Sequence
  Synthetically generated peptide
ACECANPACTGC

SEQ ID NO: 6194 - protein, 11 aa, Artificial Sequence
  Synthetically generated peptide
ACECAPACTGC

SEQ ID NO: 6195 - protein, 11 aa, Artificial Sequence
  Synthetically generated peptide
ACECANACTGC

SEQ ID NO: 6196 - protein, 11 aa, Artificial Sequence
  Synthetically generated peptide
ACECANPCTGC

SEQ ID NO: 6197 - protein, 11 aa, Artificial Sequence
  Synthetically generated peptide
ACECANPACGC

SEQ ID NO: 6198 - protein, 11 aa, Artificial Sequence
  Synthetically generated peptide
ACECANPACTC

SEQ ID NO: 6199 - protein, 12 aa, Artificial Sequence
  Synthetically generated peptide
ACEWCAPACTGC

SEQ ID NO: 6200 - protein, 11 aa, Artificial Sequence
  Synthetically generated peptide
ACEWCAACTGC

SEQ ID NO: 6201 - protein, 11 aa, Artificial Sequence
  Synthetically generated peptide
ACEWCAPCTGC

SEQ ID NO: 6202 - protein, 11 aa, Artificial Sequence
  Synthetically generated peptide
ACEWCAPACGC

SEQ ID NO: 6203 - protein, 11 aa, Artificial Sequence
  Synthetically generated peptide
ACEWCAPACTC

SEQ ID NO: 6204 - protein, 12 aa, Artificial Sequence
  Synthetically generated peptide
ACEWCANACTGC

SEQ ID NO: 6205 - protein, 11 aa, Artificial Sequence
  Synthetically generated peptide
ACEWCANCTGC

SEQ ID NO: 6206 - protein, 11 aa, Artificial Sequence
  Synthetically generated peptide
ACEWCANACGC

SEQ ID NO: 6207 - protein, 11 aa, Artificial Sequence
  Synthetically generated peptide
ACEWCANACTC

SEQ ID NO: 6208 - protein, 12 aa, Artificial Sequence
  Synthetically generated peptide
ACEWCANPCTGC

SEQ ID NO: 6209 - protein, 11 aa, Artificial Sequence
  Synthetically generated peptide
ACEWCANPCGC

SEQ ID NO: 6210 - protein, 11 aa, Artificial Sequence
  Synthetically generated peptide
ACEWCANPCTC

SEQ ID NO: 6211 - protein, 12 aa, Artificial Sequence
  Synthetically generated peptide
ACEWCANPACGC

SEQ ID NO: 6212 - protein, 11 aa, Artificial Sequence
  Synthetically generated peptide
ACEWCANPACC

SEQ ID NO: 6213 - protein, 12 aa, Artificial Sequence
  Synthetically generated peptide
ACEWCANPACTC

SEQ ID NO: 6214 - protein, 13 aa, Artificial Sequence
  Synthetically generated peptide
CCEWACNPACTGA

SEQ ID NO: 6215 - protein, 12 aa, Artificial Sequence
  Synthetically generated peptide
CCWACNPACTGA

SEQ ID NO: 6216 - protein, 11 aa, Artificial Sequence
  Synthetically generated peptide
CCACNPACTGA

SEQ ID NO: 6217 - protein, 11 aa, Artificial Sequence
  Synthetically generated peptide
CCWACPACTGA

SEQ ID NO: 6218 - protein, 11 aa, Artificial Sequence
  Synthetically generated peptide
CCWACNACTGA

SEQ ID NO: 6219 - protein, 11 aa, Artificial Sequence
  Synthetically generated peptide
CCWACNPCTGA

SEQ ID NO: 6220 - protein, 11 aa, Artificial Sequence
  Synthetically generated peptide
CCWACNPACGA

SEQ ID NO: 6221 - protein, 11 aa, Artificial Sequence
  Synthetically generated peptide
CCWACNPACTA

SEQ ID NO: 6222 - protein, 12 aa, Artificial Sequence
  Synthetically generated peptide
CCEACNPACTGA

SEQ ID NO: 6223 - protein, 11 aa, Artificial Sequence
  Synthetically generated peptide
CCEACPACTGA

SEQ ID NO: 6224 - protein, 11 aa, Artificial Sequence
  Synthetically generated peptide
CCEACNACTGA

SEQ ID NO: 6225 - protein, 11 aa, Artificial Sequence
  Synthetically generated peptide
CCEACNPCTGA

SEQ ID NO: 6226 - protein, 11 aa, Artificial Sequence
  Synthetically generated peptide
CCEACNPACGA

SEQ ID NO: 6227 - protein, 11 aa, Artificial Sequence
  Synthetically generated peptide
CCEACNPACTA

SEQ ID NO: 6228 - protein, 12 aa, Artificial Sequence
  Synthetically generated peptide
CCEWACPACTGA

SEQ ID NO: 6229 - protein, 11 aa, Artificial Sequence
  Synthetically generated peptide
CCEWACACTGA

SEQ ID NO: 6230 - protein, 11 aa, Artificial Sequence
  Synthetically generated peptide
CCEWACPCTGA

SEQ ID NO: 6231 - protein, 11 aa, Artificial Sequence
  Synthetically generated peptide
CCEWACPACGA

SEQ ID NO: 6232 - protein, 11 aa, Artificial Sequence
  Synthetically generated peptide
CCEWACPACTA

SEQ ID NO: 6233 - protein, 12 aa, Artificial Sequence
  Synthetically generated peptide
CCEWACNACTGA

SEQ ID NO: 6234 - protein, 11 aa, Artificial Sequence
  Synthetically generated peptide
CCEWACNCTGA

SEQ ID NO: 6235 - protein, 11 aa, Artificial Sequence
  Synthetically generated peptide
CCEWACNACGA

SEQ ID NO: 6236 - protein, 11 aa, Artificial Sequence
  Synthetically generated peptide
CCEWACNACTA

SEQ ID NO: 6237 - protein, 12 aa, Artificial Sequence
  Synthetically generated peptide
CCEWACNPCTGA

SEQ ID NO: 6238 - protein, 11 aa, Artificial Sequence
  Synthetically generated peptide
CCEWACNPCGA

SEQ ID NO: 6239 - protein, 11 aa, Artificial Sequence
  Synthetically generated peptide
CCEWACNPCTA

SEQ ID NO: 6240 - protein, 12 aa, Artificial Sequence
  Synthetically generated peptide
CCEWACNPACGA

SEQ ID NO: 6241 - protein, 11 aa, Artificial Sequence
  Synthetically generated peptide
CCEWACNPACA

SEQ ID NO: 6242 - protein, 12 aa, Artificial Sequence
  Synthetically generated peptide
CCEWACNPACTA

SEQ ID NO: 6243 - protein, 14 aa, Artificial Sequence
  Synthetically generated peptide
  VARIANT (1)..(14): Xaa = Any Amino Acid
ACXELCANPACTGC

SEQ ID NO: 6244 - protein, 16 aa, Artificial Sequence
  Synthetically generated peptide
  VARIANT (1)..(16): Xaa = Any Amino Acid
AACXXELCANPACTGC

SEQ ID NO: 6245 - protein, 16 aa, Artificial Sequence
  Synthetically generated peptide
  VARIANT (1)..(16): Xaa = Any Amino Acid
ACXXXELCANPACTGC

SEQ ID NO: 6246 - protein, 18 aa, Artificial Sequence
  Synthetically generated peptide
  VARIANT (1)..(18): Xaa = Any Amino Acid
AACXXXXELCANPACTGC

SEQ ID NO: 6247 - protein, 17 aa, Artificial Sequence
  Synthetically generated peptide
  VARIANT (1)..(17): Xaa = Any Amino Acid
ACXXXEXLCANPACTGC

SEQ ID NO: 6248 - protein, 17 aa, Artificial Sequence
  Synthetically generated peptide
  VARIANT (1)..(17): Xaa = Any Amino Acid
ACXXXELXCANPACTGC

SEQ ID NO: 6249 - protein, 17 aa, Artificial Sequence
  Synthetically generated peptide
  VARIANT (1)..(17): Xaa = Any Amino Acid
ACXXXELCAXNPACTGC

SEQ ID NO: 6250 - protein, 17 aa, Artificial Sequence
  Synthetically generated peptide
  VARIANT (1)..(17): Xaa = Any Amino Acid
ACXXXELCANXPACTGC

SEQ ID NO: 6251 - protein, 17 aa, Artificial Sequence
  Synthetically generated peptide
  VARIANT (1)..(17): Xaa = Any Amino Acid
ACXXXELCANPXACTGC

SEQ ID NO: 6252 - protein, 17 aa, Artificial Sequence
  Synthetically generated peptide
  VARIANT (1)..(17): Xaa = Any Amino Acid
ACXXXELCANPAXCTGC

SEQ ID NO: 6253 - protein, 17 aa, Artificial Sequence
  Synthetically generated peptide
  VARIANT (1)..(17): Xaa = Any Amino Acid
ACXXXELCANPACXTGC

SEQ ID NO: 6254 - protein, 17 aa, Artificial Sequence
  Synthetically generated peptide
  VARIANT (1)..(17): Xaa = Any Amino Acid
ACXXXELCANPACTXGC

SEQ ID NO: 6255 - protein, 17 aa, Artificial Sequence
  Synthetically generated peptide
  VARIANT (1)..(17): Xaa = Any Amino Acid
ACXXXELCANPACTGXC

SEQ ID NO: 6256 - protein, 16 aa, Artificial Sequence
  Synthetically generated peptide
  VARIANT (1)..(16): Xaa = Any Amino Acid
ACXXEXLCANPACTGC

SEQ ID NO: 6257 - protein, 17 aa, Artificial Sequence
  Synthetically generated peptide
  VARIANT (1)..(17): Xaa = Any Amino Acid
ACXXEXXLCANPACTGC

SEQ ID NO: 6258 - protein, 17 aa, Artificial Sequence
  Synthetically generated peptide
  VARIANT (1)..(17): Xaa = Any Amino Acid
ACXXEXLXCANPACTGC

SEQ ID NO: 6259 - protein, 17 aa, Artificial Sequence
  Synthetically generated peptide
  VARIANT (1)..(17): Xaa = Any Amino Acid
ACXXEXLCAXNPACTGC

SEQ ID NO: 6260 - protein, 17 aa, Artificial Sequence
  Synthetically generated peptide
  VARIANT (1)..(17): Xaa = Any Amino Acid
ACXXEXLCANXPACTGC

SEQ ID NO: 6261 - protein, 17 aa, Artificial Sequence
  Synthetically generated peptide
  VARIANT (1)..(17): Xaa = Any Amino Acid
ACXXEXLCANPXACTGC

SEQ ID NO: 6262 - protein, 17 aa, Artificial Sequence
  Synthetically generated peptide
  VARIANT (1)..(17): Xaa = Any Amino Acid
ACXXEXLCANPAXCTGC

SEQ ID NO: 6263 - protein, 17 aa, Artificial Sequence
  Synthetically generated peptide
  VARIANT (1)..(17): Xaa = Any Amino Acid
ACXXEXLCANPACXTGC

SEQ ID NO: 6264 - protein, 17 aa, Artificial Sequence
  Synthetically generated peptide
  VARIANT (1)..(17): Xaa = Any Amino Acid
ACXXEXLCANPACTXGC

SEQ ID NO: 6265 - protein, 17 aa, Artificial Sequence
  Synthetically generated peptide
  VARIANT (1)..(17): Xaa = Any Amino Acid
ACXXEXLCANPACTGXC

SEQ ID NO: 6266 - protein, 16 aa, Artificial Sequence
  Synthetically generated peptide
  VARIANT (1)..(16): Xaa = Any Amino Acid
ACXXELXCANPACTGC

SEQ ID NO: 6267 - protein, 17 aa, Artificial Sequence
  Synthetically generated peptide
  VARIANT (1)..(17): Xaa = Any Amino Acid
ACXXELXXCANPACTGC

SEQ ID NO: 6268 - protein, 17 aa, Artificial Sequence
  Synthetically generated peptide
  VARIANT (1)..(17): Xaa = Any Amino Acid
ACXXELXCAXNPACTGC

SEQ ID NO: 6269 - protein, 17 aa, Artificial Sequence
  Synthetically generated peptide
  VARIANT (1)..(17): Xaa = Any Amino Acid
ACXXELXCANXPACTGC

SEQ ID NO: 6270 - protein, 17 aa, Artificial Sequence
  Synthetically generated peptide
  VARIANT (1)..(17): Xaa = Any Amino Acid
ACXXELXCANPXACTGC

SEQ ID NO: 6271 - protein, 17 aa, Artificial Sequence
  Synthetically generated peptide
  VARIANT (1)..(17): Xaa = Any Amino Acid
ACXXELXCANPAXCTGC

SEQ ID NO: 6272 - protein, 17 aa, Artificial Sequence
  Synthetically generated peptide
  VARIANT (1)..(17): Xaa = Any Amino Acid
ACXXELXCANPACXTGC

SEQ ID NO: 6273 - protein, 17 aa, Artificial Sequence
  Synthetically generated peptide
  VARIANT (1)..(17): Xaa = Any Amino Acid
ACXXELXCANPACTXGC

SEQ ID NO: 6274 - protein, 17 aa, Artificial Sequence
  Synthetically generated peptide
  VARIANT (1)..(17): Xaa = Any Amino Acid
ACXXELXCANPACTGXC

SEQ ID NO: 6275 - protein, 16 aa, Artificial Sequence
  Synthetically generated peptide
  VARIANT (1)..(16): Xaa = Any Amino Acid
ACXXELCAXNPACTGC

SEQ ID NO: 6276 - protein, 17 aa, Artificial Sequence
  Synthetically generated peptide
  VARIANT (1)..(17): Xaa = Any Amino Acid
ACXXELCAXXNPACTGC

SEQ ID NO: 6277 - protein, 17 aa, Artificial Sequence
  Synthetically generated peptide
  VARIANT (1)..(17): Xaa = Any Amino Acid
ACXXELCAXNXPACTGC

SEQ ID NO: 6278 - protein, 17 aa, Artificial Sequence
  Synthetically generated peptide
  VARIANT (1)..(17): Xaa = Any Amino Acid
ACXXELCAXNPXACTGC

SEQ ID NO: 6279 - protein, 17 aa, Artificial Sequence
  Synthetically generated peptide
  VARIANT (1)..(17): Xaa = Any Amino Acid
ACXXELCAXNPAXCTGC

SEQ ID NO: 6280 - protein, 17 aa, Artificial Sequence
  Synthetically generated peptide
  VARIANT (1)..(17): Xaa = Any Amino Acid
ACXXELCAXNPACXTGC

SEQ ID NO: 6281 - protein, 17 aa, Artificial Sequence
  Synthetically generated peptide
  VARIANT (1)..(17): Xaa = Any Amino Acid
ACXXELCAXNPACTXGC

SEQ ID NO: 6282 - protein, 17 aa, Artificial Sequence
  Synthetically generated peptide
  VARIANT (1)..(17): Xaa = Any Amino Acid
ACXXELCAXNPACTGXC

SEQ ID NO: 6283 - protein, 16 aa, Artificial Sequence
  Synthetically generated peptide
  VARIANT (1)..(16): Xaa = Any Amino Acid
ACXXELCANXPACTGC

SEQ ID NO: 6284 - protein, 17 aa, Artificial Sequence
  Synthetically generated peptide
  VARIANT (1)..(17): Xaa = Any Amino Acid
ACXXELCANXXPACTGC

SEQ ID NO: 6285 - protein, 17 aa, Artificial Sequence
  Synthetically generated peptide
  VARIANT (1)..(17): Xaa = Any Amino Acid
ACXXELCANXPXACTGC

SEQ ID NO: 6286 - protein, 17 aa, Artificial Sequence
  Synthetically generated peptide
  VARIANT (1)..(17): Xaa = Any Amino Acid
ACXXELCANXPAXCTGC

SEQ ID NO: 6287 - protein, 17 aa, Artificial Sequence
  Synthetically generated peptide
  VARIANT (1)..(17): Xaa = Any Amino Acid
ACXXELCANXPACXTGC

SEQ ID NO: 6288 - protein, 17 aa, Artificial Sequence
  Synthetically generated peptide
  VARIANT (1)..(17): Xaa = Any Amino Acid
ACXXELCANXPACTXGC

SEQ ID NO: 6289 - protein, 17 aa, Artificial Sequence
  Synthetically generated peptide
  VARIANT (1)..(17): Xaa = Any Amino Acid
ACXXELCANXPACTGXC

SEQ ID NO: 6290 - protein, 16 aa, Artificial Sequence
  Synthetically generated peptide
  VARIANT (1)..(16): Xaa = Any Amino Acid
ACXXELCANPXACTGC

SEQ ID NO: 6291 - protein, 17 aa, Artificial Sequence
  Synthetically generated peptide
  VARIANT (1)..(17): Xaa = Any Amino Acid
ACXXELCANPXXACTGC

SEQ ID NO: 6292 - protein, 17 aa, Artificial Sequence
  Synthetically generated peptide
  VARIANT (1)..(17): Xaa = Any Amino Acid
ACXXELCANPXAXCTGC

SEQ ID NO: 6293 - protein, 17 aa, Artificial Sequence
  Synthetically generated peptide
  VARIANT (1)..(17): Xaa = Any Amino Acid
ACXXELCANPXACXTGC

SEQ ID NO: 6294 - protein, 17 aa, Artificial Sequence
  Synthetically generated peptide
  VARIANT (1)..(17): Xaa = Any Amino Acid
ACXXELCANPXACTXGC

SEQ ID NO: 6295 - protein, 17 aa, Artificial Sequence
  Synthetically generated peptide
  VARIANT (1)..(17): Xaa = Any Amino Acid
ACXXELCANPXACTGXC

SEQ ID NO: 6296 - protein, 16 aa, Artificial Sequence
  Synthetically generated peptide
  VARIANT (1)..(16): Xaa = Any Amino Acid
ACXXELCANPAXCTGC

SEQ ID NO: 6297 - protein, 17 aa, Artificial Sequence
  Synthetically generated peptide
  VARIANT (1)..(17): Xaa = Any Amino Acid
ACXXELCANPAXXCTGC

SEQ ID NO: 6298 - protein, 17 aa, Artificial Sequence
  Synthetically generated peptide
  VARIANT (1)..(17): Xaa = Any Amino Acid
ACXXELCANPAXCXTGC

SEQ ID NO: 6299 - protein, 17 aa, Artificial Sequence
  Synthetically generated peptide
  VARIANT (1)..(17): Xaa = Any Amino Acid
ACXXELCANPAXCTXGC

SEQ ID NO: 6300 - protein, 17 aa, Artificial Sequence
  Synthetically generated peptide
  VARIANT (1)..(17): Xaa = Any Amino Acid
ACXXELCANPAXCTGXC

SEQ ID NO: 6301 - protein, 16 aa, Artificial Sequence
  Synthetically generated peptide
  VARIANT (1)..(16): Xaa = Any Amino Acid
ACXXELCANPACXTGC

SEQ ID NO: 6302 - protein, 17 aa, Artificial Sequence
  Synthetically generated peptide
  VARIANT (1)..(17): Xaa = Any Amino Acid
ACXXELCANPACXXTGC

SEQ ID NO: 6303 - protein, 17 aa, Artificial Sequence
  Synthetically generated peptide
  VARIANT (1)..(17): Xaa = Any Amino Acid
ACXXELCANPACXTXGC

SEQ ID NO: 6304 - protein, 17 aa, Artificial Sequence
  Synthetically generated peptide
  VARIANT (1)..(17): Xaa = Any Amino Acid
ACXXELCANPACXTGXC

SEQ ID NO: 6305 - protein, 16 aa, Artificial Sequence
  Synthetically generated peptide
  VARIANT (1)..(16): Xaa = Any Amino Acid
ACXXELCANPACTXGC

SEQ ID NO: 6306 - protein, 17 aa, Artificial Sequence
  Synthetically generated peptide
  VARIANT (1)..(17): Xaa = Any Amino Acid
ACXXELCANPACTXXGC

SEQ ID NO: 6307 - protein, 17 aa, Artificial Sequence
  Synthetically generated peptide
  VARIANT (1)..(17): Xaa = Any Amino Acid
ACXXELCANPACTXGXC

SEQ ID NO: 6308 - protein, 16 aa, Artificial Sequence
  Synthetically generated peptide
  VARIANT (1)..(16): Xaa = Any Amino Acid
ACXXELCANPACTGXC

SEQ ID NO: 6309 - protein, 17 aa, Artificial Sequence
  Synthetically generated peptide
  VARIANT (1)..(17): Xaa = Any Amino Acid
ACXXELCANPACTGXXC

SEQ ID NO: 6310 - protein, 15 aa, Artificial Sequence
  Synthetically generated peptide
  VARIANT (1)..(15): Xaa = Any Amino Acid
ACXEXLCANPACTGC

SEQ ID NO: 6311 - protein, 16 aa, Artificial Sequence
  Synthetically generated peptide
  VARIANT (1)..(16): Xaa = Any Amino Acid
ACXEXXLCANPACTGC

SEQ ID NO: 6312 - protein, 17 aa, Artificial Sequence
  Synthetically generated peptide
  VARIANT (1)..(17): Xaa = Any Amino Acid
ACXEXXXLCANPACTGC

SEQ ID NO: 6313 - protein, 17 aa, Artificial Sequence
  Synthetically generated peptide
  VARIANT (1)..(17): Xaa = Any Amino Acid
ACXEXXLXCANPACTGC

SEQ ID NO: 6314 - protein, 17 aa, Artificial Sequence
  Synthetically generated peptide
  VARIANT (1)..(17): Xaa = Any Amino Acid
ACXEXXLCAXNPACTGC

SEQ ID NO: 6315 - protein, 17 aa, Artificial Sequence
  Synthetically generated peptide
  VARIANT (1)..(17): Xaa = Any Amino Acid
ACXEXXLCANXPACTGC

SEQ ID NO: 6316 - protein, 17 aa, Artificial Sequence
  Synthetically generated peptide
  VARIANT (1)..(17): Xaa = Any Amino Acid
ACXEXXLCANPXACTGC

SEQ ID NO: 6317 - protein, 17 aa, Artificial Sequence
  Synthetically generated peptide
  VARIANT (1)..(17): Xaa = Any Amino Acid
ACXEXXLCANPAXCTGC

SEQ ID NO: 6318 - protein, 17 aa, Artificial Sequence
  Synthetically generated peptide
  VARIANT (1)..(17): Xaa = Any Amino Acid
ACXEXXLCANPACXTGC

SEQ ID NO: 6319 - protein, 17 aa, Artificial Sequence
  Synthetically generated peptide
  VARIANT (1)..(17): Xaa = Any Amino Acid
ACXEXXLCANPACTXGC

SEQ ID NO: 6320 - protein, 17 aa, Artificial Sequence
  Synthetically generated peptide
  VARIANT (1)..(17): Xaa = Any Amino Acid
ACXEXXLCANPACTGXC

SEQ ID NO: 6321 - protein, 16 aa, Artificial Sequence
  Synthetically generated peptide
  VARIANT (1)..(16): Xaa = Any Amino Acid
ACXEXLXCANPACTGC

SEQ ID NO: 6322 - protein, 17 aa, Artificial Sequence
  Synthetically generated peptide
  VARIANT (1)..(17): Xaa = Any Amino Acid
ACXEXLXXCANPACTGC

SEQ ID NO: 6323 - protein, 17 aa, Artificial Sequence
  Synthetically generated peptide
  VARIANT (1)..(17): Xaa = Any Amino Acid
ACXEXLXCAXNPACTGC

SEQ ID NO: 6324 - protein, 17 aa, Artificial Sequence
  Synthetically generated peptide
  VARIANT (1)..(17): Xaa = Any Amino Acid
ACXEXLXCANXPACTGC

SEQ ID NO: 6325 - protein, 17 aa, Artificial Sequence
  Synthetically generated peptide
  VARIANT (1)..(17): Xaa = Any Amino Acid
ACXEXLXCANPXACTGC

SEQ ID NO: 6326 - protein, 17 aa, Artificial Sequence
  Synthetically generated peptide
  VARIANT (1)..(17): Xaa = Any Amino Acid
ACXEXLXCANPAXCTGC

SEQ ID NO: 6327 - protein, 17 aa, Artificial Sequence
  Synthetically generated peptide
  VARIANT (1)..(17): Xaa = Any Amino Acid
ACXEXLXCANPACXTGC

SEQ ID NO: 6328 - protein, 17 aa, Artificial Sequence
  Synthetically generated peptide
  VARIANT (1)..(17): Xaa = Any Amino Acid
ACXEXLXCANPACTXGC

SEQ ID NO: 6329 - protein, 17 aa, Artificial Sequence
  Synthetically generated peptide
  VARIANT (1)..(17): Xaa = Any Amino Acid
ACXEXLXCANPACTGXC

SEQ ID NO: 6330 - protein, 16 aa, Artificial Sequence
  Synthetically generated peptide
  VARIANT (1)..(16): Xaa = Any Amino Acid
ACXEXLCAXNPACTGC

SEQ ID NO: 6331 - protein, 17 aa, Artificial Sequence
  Synthetically generated peptide
  VARIANT (1)..(17): Xaa = Any Amino Acid
ACXEXLCAXXNPACTGC

SEQ ID NO: 6332 - protein, 17 aa, Artificial Sequence
  Synthetically generated peptide
  VARIANT (1)..(17): Xaa = Any Amino Acid
ACXEXLCAXNXPACTGC

SEQ ID NO: 6333 - protein, 17 aa, Artificial Sequence
  Synthetically generated peptide
  VARIANT (1)..(17): Xaa = Any Amino Acid
ACXEXLCAXNPXACTGC

SEQ ID NO: 6334 - protein, 17 aa, Artificial Sequence
  Synthetically generated peptide
  VARIANT (1)..(17): Xaa = Any Amino Acid
ACXEXLCAXNPAXCTGC

SEQ ID NO: 6335 - protein, 17 aa, Artificial Sequence
  Synthetically generated peptide
  VARIANT (1)..(17): Xaa = Any Amino Acid
ACXEXLCAXNPACXTGC

SEQ ID NO: 6336 - protein, 17 aa, Artificial Sequence
  Synthetically generated peptide
  VARIANT (1)..(17): Xaa = Any Amino Acid
ACXEXLCAXNPACTXGC

SEQ ID NO: 6337 - protein, 17 aa, Artificial Sequence
  Synthetically generated peptide
  VARIANT (1)..(17): Xaa = Any Amino Acid
ACXEXLCAXNPACTGXC

SEQ ID NO: 6338 - protein, 16 aa, Artificial Sequence
  Synthetically generated peptide
  VARIANT (1)..(16): Xaa = Any Amino Acid
ACXEXLCANXPACTGC

SEQ ID NO: 6339 - protein, 17 aa, Artificial Sequence
  Synthetically generated peptide
  VARIANT (1)..(17): Xaa = Any Amino Acid
ACXEXLCANXXPACTGC

SEQ ID NO: 6340 - protein, 17 aa, Artificial Sequence
  Synthetically generated peptide
  VARIANT (1)..(17): Xaa = Any Amino Acid
ACXEXLCANXPXACTGC

SEQ ID NO: 6341 - protein, 17 aa, Artificial Sequence
  Synthetically generated peptide
  VARIANT (1)..(17): Xaa = Any Amino Acid
ACXEXLCANXPAXCTGC

SEQ ID NO: 6342 - protein, 17 aa, Artificial Sequence
  Synthetically generated peptide
  VARIANT (1)..(17): Xaa = Any Amino Acid
ACXEXLCANXPACXTGC

SEQ ID NO: 6343 - protein, 17 aa, Artificial Sequence
  Synthetically generated peptide
  VARIANT (1)..(17): Xaa = Any Amino Acid
ACXEXLCANXPACTXGC

SEQ ID NO: 6344 - protein, 17 aa, Artificial Sequence
  Synthetically generated peptide
  VARIANT (1)..(17): Xaa = Any Amino Acid
ACXEXLCANXPACTGXC

SEQ ID NO: 6345 - protein, 16 aa, Artificial Sequence
  Synthetically generated peptide
  VARIANT (1)..(16): Xaa = Any Amino Acid
ACXEXLCANPXACTGC

SEQ ID NO: 6346 - protein, 17 aa, Artificial Sequence
  Synthetically generated peptide
  VARIANT (1)..(17): Xaa = Any Amino Acid
ACXEXLCANPXXACTGC

SEQ ID NO: 6347 - protein, 17 aa, Artificial Sequence
  Synthetically generated peptide
  VARIANT (1)..(17): Xaa = Any Amino Acid
ACXEXLCANPXAXCTGC

SEQ ID NO: 6348 - protein, 17 aa, Artificial Sequence
  Synthetically generated peptide
  VARIANT (1)..(17): Xaa = Any Amino Acid
ACXEXLCANPXACXTGC

SEQ ID NO: 6349 - protein, 17 aa, Artificial Sequence
  Synthetically generated peptide
  VARIANT (1)..(17): Xaa = Any Amino Acid
ACXEXLCANPXACTXGC

SEQ ID NO: 6350 - protein, 17 aa, Artificial Sequence
  Synthetically generated peptide
  VARIANT (1)..(17): Xaa = Any Amino Acid
ACXEXLCANPXACTGXC

SEQ ID NO: 6351 - protein, 16 aa, Artificial Sequence
  Synthetically generated peptide
  VARIANT (1)..(16): Xaa = Any Amino Acid
ACXEXLCANPAXCTGC

SEQ ID NO: 6352 - protein, 17 aa, Artificial Sequence
  Synthetically generated peptide
  VARIANT (1)..(17): Xaa = Any Amino Acid
ACXEXLCANPAXXCTGC

SEQ ID NO: 6353 - protein, 17 aa, Artificial Sequence
  Synthetically generated peptide
  VARIANT (1)..(17): Xaa = Any Amino Acid
ACXEXLCANPAXCXTGC

SEQ ID NO: 6354 - protein, 17 aa, Artificial Sequence
  Synthetically generated peptide
  VARIANT (1)..(17): Xaa = Any Amino Acid
ACXEXLCANPAXCTXGC

SEQ ID NO: 6355 - protein, 17 aa, Artificial Sequence
  Synthetically generated peptide
  VARIANT (1)..(17): Xaa = Any Amino Acid
ACXEXLCANPAXCTGXC

SEQ ID NO: 6356 - protein, 16 aa, Artificial Sequence
  Synthetically generated peptide
  VARIANT (1)..(16): Xaa = Any Amino Acid
ACXEXLCANPACXTGC

SEQ ID NO: 6357 - protein, 17 aa, Artificial Sequence
  Synthetically generated peptide
  VARIANT (1)..(17): Xaa = Any Amino Acid
ACXEXLCANPACXXTGC

SEQ ID NO: 6358 - protein, 17 aa, Artificial Sequence
  Synthetically generated peptide
  VARIANT (1)..(17): Xaa = Any Amino Acid
ACXEXLCANPACXTXGC

SEQ ID NO: 6359 - protein, 17 aa, Artificial Sequence
  Synthetically generated peptide
  VARIANT (1)..(17): Xaa = Any Amino Acid
ACXEXLCANPACXTGXC

SEQ ID NO: 6360 - protein, 16 aa, Artificial Sequence
  Synthetically generated peptide
  VARIANT (1)..(16): Xaa = Any Amino Acid
ACXEXLCANPACTXGC

SEQ ID NO: 6361 - protein, 17 aa, Artificial Sequence
  Synthetically generated peptide
  VARIANT (1)..(17): Xaa = Any Amino Acid
ACXEXLCANPACTXXGC

SEQ ID NO: 6362 - protein, 17 aa, Artificial Sequence
  Synthetically generated peptide
  VARIANT (1)..(17): Xaa = Any Amino Acid
ACXEXLCANPACTXGXC

SEQ ID NO: 6363 - protein, 16 aa, Artificial Sequence
  Synthetically generated peptide
  VARIANT (1)..(16): Xaa = Any Amino Acid
ACXEXLCANPACTGXC

SEQ ID NO: 6364 - protein, 17 aa, Artificial Sequence
  Synthetically generated peptide
  VARIANT (1)..(17): Xaa = Any Amino Acid
ACXEXLCANPACTGXXC

SEQ ID NO: 6365 - protein, 15 aa, Artificial Sequence
  Synthetically generated peptide
  VARIANT (1)..(15): Xaa = Any Amino Acid
ACXELXCANPACTGC

SEQ ID NO: 6366 - protein, 16 aa, Artificial Sequence
  Synthetically generated peptide
  VARIANT (1)..(16): Xaa = Any Amino Acid
ACXELXXCANPACTGC

SEQ ID NO: 6367 - protein, 17 aa, Artificial Sequence
  Synthetically generated peptide
  VARIANT (1)..(17): Xaa = Any Amino Acid
ACXELXXXCANPACTGC

SEQ ID NO: 6368 - protein, 17 aa, Artificial Sequence
  Synthetically generated peptide
  VARIANT (1)..(17): Xaa = Any Amino Acid
ACXELXXCAXNPACTGC

SEQ ID NO: 6369 - protein, 17 aa, Artificial Sequence
  Synthetically generated peptide
  VARIANT (1)..(17): Xaa = Any Amino Acid
ACXELXXCANXPACTGC

SEQ ID NO: 6370 - protein, 17 aa, Artificial Sequence
  Synthetically generated peptide
  VARIANT (1)..(17): Xaa = Any Amino Acid
ACXELXXCANPXACTGC

SEQ ID NO: 6371 - protein, 17 aa, Artificial Sequence
  Synthetically generated peptide
  VARIANT (1)..(17): Xaa = Any Amino Acid
ACXELXXCANPAXCTGC

SEQ ID NO: 6372 - protein, 17 aa, Artificial Sequence
  Synthetically generated peptide
  VARIANT (1)..(17): Xaa = Any Amino Acid
ACXELXXCANPACXTGC

SEQ ID NO: 6373 - protein, 17 aa, Artificial Sequence
  Synthetically generated peptide
  VARIANT (1)..(17): Xaa = Any Amino Acid
ACXELXXCANPACTXGC

SEQ ID NO: 6374 - protein, 17 aa, Artificial Sequence
  Synthetically generated peptide
  VARIANT (1)..(17): Xaa = Any Amino Acid
ACXELXXCANPACTGXC

SEQ ID NO: 6375 - protein, 16 aa, Artificial Sequence
  Synthetically generated peptide
  VARIANT (1)..(16): Xaa = Any Amino Acid
ACXELXCAXNPACTGC

SEQ ID NO: 6376 - protein, 17 aa, Artificial Sequence
  Synthetically generated peptide
  VARIANT (1)..(17): Xaa = Any Amino Acid
ACXELXCAXXNPACTGC

SEQ ID NO: 6377 - protein, 17 aa, Artificial Sequence
  Synthetically generated peptide
  VARIANT (1)..(17): Xaa = Any Amino Acid
ACXELXCAXNXPACTGC

SEQ ID NO: 6378 - protein, 17 aa, Artificial Sequence
  Synthetically generated peptide
  VARIANT (1)..(17): Xaa = Any Amino Acid
ACXELXCAXNPXACTGC

SEQ ID NO: 6379 - protein, 17 aa, Artificial Sequence
  Synthetically generated peptide
  VARIANT (1)..(17): Xaa = Any Amino Acid
ACXELXCAXNPAXCTGC

SEQ ID NO: 6380 - protein, 17 aa, Artificial Sequence
  Synthetically generated peptide
  VARIANT (1)..(17): Xaa = Any Amino Acid
ACXELXCAXNPACXTGC

SEQ ID NO: 6381 - protein, 17 aa, Artificial Sequence
  Synthetically generated peptide
  VARIANT (1)..(17): Xaa = Any Amino Acid
ACXELXCAXNPACTXGC

SEQ ID NO: 6382 - protein, 17 aa, Artificial Sequence
  Synthetically generated peptide
  VARIANT (1)..(17): Xaa = Any Amino Acid
ACXELXCAXNPACTGXC

SEQ ID NO: 6383 - protein, 16 aa, Artificial Sequence
  Synthetically generated peptide
  VARIANT (1)..(16): Xaa = Any Amino Acid
ACXELXCANXPACTGC

SEQ ID NO: 6384 - protein, 17 aa, Artificial Sequence
  Synthetically generated peptide
  VARIANT (1)..(17): Xaa = Any Amino Acid
ACXELXCANXXPACTGC

SEQ ID NO: 6385 - protein, 17 aa, Artificial Sequence
  Synthetically generated peptide
  VARIANT (1)..(17): Xaa = Any Amino Acid
ACXELXCANXPXACTGC

SEQ ID NO: 6386 - protein, 17 aa, Artificial Sequence
  Synthetically generated peptide
  VARIANT (1)..(17): Xaa = Any Amino Acid
ACXELXCANXPAXCTGC

SEQ ID NO: 6387 - protein, 17 aa, Artificial Sequence
  Synthetically generated peptide
  VARIANT (1)..(17): Xaa = Any Amino Acid
ACXELXCANXPACXTGC

SEQ ID NO: 6388 - protein, 17 aa, Artificial Sequence
  Synthetically generated peptide
  VARIANT (1)..(17): Xaa = Any Amino Acid
ACXELXCANXPACTXGC

SEQ ID NO: 6389 - protein, 17 aa, Artificial Sequence
  Synthetically generated peptide
  VARIANT (1)..(17): Xaa = Any Amino Acid
ACXELXCANXPACTGXC

SEQ ID NO: 6390 - protein, 16 aa, Artificial Sequence
  Synthetically generated peptide
  VARIANT (1)..(16): Xaa = Any Amino Acid
ACXELXCANPXACTGC

SEQ ID NO: 6391 - protein, 17 aa, Artificial Sequence
  Synthetically generated peptide
  VARIANT (1)..(17): Xaa = Any Amino Acid
ACXELXCANPXXACTGC

SEQ ID NO: 6392 - protein, 17 aa, Artificial Sequence
  Synthetically generated peptide
  VARIANT (1)..(17): Xaa = Any Amino Acid
ACXELXCANPXAXCTGC

SEQ ID NO: 6393 - protein, 17 aa, Artificial Sequence
  Synthetically generated peptide
  VARIANT (1)..(17): Xaa = Any Amino Acid
ACXELXCANPXACXTGC

SEQ ID NO: 6394 - protein, 17 aa, Artificial Sequence
  Synthetically generated peptide
  VARIANT (1)..(17): Xaa = Any Amino Acid
ACXELXCANPXACTXGC

SEQ ID NO: 6395 - protein, 17 aa, Artificial Sequence
  Synthetically generated peptide
  VARIANT (1)..(17): Xaa = Any Amino Acid
ACXELXCANPXACTGXC

SEQ ID NO: 6396 - protein, 16 aa, Artificial Sequence
  Synthetically generated peptide
  VARIANT (1)..(16): Xaa = Any Amino Acid
ACXELXCANPAXCTGC

SEQ ID NO: 6397 - protein, 17 aa, Artificial Sequence
  Synthetically generated peptide
  VARIANT (1)..(17): Xaa = Any Amino Acid
ACXELXCANPAXXCTGC

SEQ ID NO: 6398 - protein, 17 aa, Artificial Sequence
  Synthetically generated peptide
  VARIANT (1)..(17): Xaa = Any Amino Acid
ACXELXCANPAXCXTGC

SEQ ID NO: 6399 - protein, 17 aa, Artificial Sequence
  Synthetically generated peptide
  VARIANT (1)..(17): Xaa = Any Amino Acid
ACXELXCANPAXCTXGC

SEQ ID NO: 6400 - protein, 17 aa, Artificial Sequence
  Synthetically generated peptide
  VARIANT (1)..(17): Xaa = Any Amino Acid
ACXELXCANPAXCTGXC

SEQ ID NO: 6401 - protein, 16 aa, Artificial Sequence
  Synthetically generated peptide
  VARIANT (1)..(16): Xaa = Any Amino Acid
ACXELXCANPACXTGC

SEQ ID NO: 6402 - protein, 17 aa, Artificial Sequence
  Synthetically generated peptide
  VARIANT (1)..(17): Xaa = Any Amino Acid
ACXELXCANPACXXTGC

SEQ ID NO: 6403 - protein, 17 aa, Artificial Sequence
  Synthetically generated peptide
  VARIANT (1)..(17): Xaa = Any Amino Acid
ACXELXCANPACXTXGC

SEQ ID NO: 6404 - protein, 17 aa, Artificial Sequence
  Synthetically generated peptide
  VARIANT (1)..(17): Xaa = Any Amino Acid
ACXELXCANPACXTGXC

SEQ ID NO: 6405 - protein, 16 aa, Artificial Sequence
  Synthetically generated peptide
  VARIANT (1)..(16): Xaa = Any Amino Acid
ACXELXCANPACTXGC

SEQ ID NO: 6406 - protein, 17 aa, Artificial Sequence
  Synthetically generated peptide
  VARIANT (1)..(17): Xaa = Any Amino Acid
ACXELXCANPACTXXGC

SEQ ID NO: 6407 - protein, 17 aa, Artificial Sequence
  Synthetically generated peptide
  VARIANT (1)..(17): Xaa = Any Amino Acid
ACXELXCANPACTXGXC

SEQ ID NO: 6408 - protein, 16 aa, Artificial Sequence
  Synthetically generated peptide
  VARIANT (1)..(16): Xaa = Any Amino Acid
ACXELXCANPACTGXC

SEQ ID NO: 6409 - protein, 17 aa, Artificial Sequence
  Synthetically generated peptide
  VARIANT (1)..(17): Xaa = Any Amino Acid
ACXELXCANPACTGXXC

SEQ ID NO: 6410 - protein, 15 aa, Artificial Sequence
  Synthetically generated peptide
  VARIANT (1)..(15): Xaa = Any Amino Acid
ACXELCAXNPACTGC

SEQ ID NO: 6411 - protein, 16 aa, Artificial Sequence
  Synthetically generated peptide
  VARIANT (1)..(16): Xaa = Any Amino Acid
ACXELCAXXNPACTGC

SEQ ID NO: 6412 - protein, 17 aa, Artificial Sequence
  Synthetically generated peptide
  VARIANT (1)..(17): Xaa = Any Amino Acid
ACXELCAXXXNPACTGC

SEQ ID NO: 6413 - protein, 17 aa, Artificial Sequence
  Synthetically generated peptide
  VARIANT (1)..(17): Xaa = Any Amino Acid
ACXELCAXXNXPACTGC

SEQ ID NO: 6414 - protein, 17 aa, Artificial Sequence
  Synthetically generated peptide
  VARIANT (1)..(17): Xaa = Any Amino Acid
ACXELCAXXNPXACTGC

SEQ ID NO: 6415 - protein, 17 aa, Artificial Sequence
  Synthetically generated peptide
  VARIANT (1)..(17): Xaa = Any Amino Acid
ACXELCAXXNPAXCTGC

SEQ ID NO: 6416 - protein, 17 aa, Artificial Sequence
  Synthetically generated peptide
  VARIANT (1)..(17): Xaa = Any Amino Acid
ACXELCAXXNPACXTGC

SEQ ID NO: 6417 - protein, 17 aa, Artificial Sequence
  Synthetically generated peptide
  VARIANT (1)..(17): Xaa = Any Amino Acid
ACXELCAXXNPACTXGC

SEQ ID NO: 6418 - protein, 17 aa, Artificial Sequence
  Synthetically generated peptide
  VARIANT (1)..(17): Xaa = Any Amino Acid
ACXELCAXXNPACTGXC

SEQ ID NO: 6419 - protein, 16 aa, Artificial Sequence
  Synthetically generated peptide
  VARIANT (1)..(16): Xaa = Any Amino Acid
ACXELCAXNXPACTGC

SEQ ID NO: 6420 - protein, 17 aa, Artificial Sequence
  Synthetically generated peptide
  VARIANT (1)..(17): Xaa = Any Amino Acid
ACXELCAXNXXPACTGC

SEQ ID NO: 6421 - protein, 17 aa, Artificial Sequence
  Synthetically generated peptide
  VARIANT (1)..(17): Xaa = Any Amino Acid
ACXELCAXNXPXACTGC

SEQ ID NO: 6422 - protein, 17 aa, Artificial Sequence
  Synthetically generated peptide
  VARIANT (1)..(17): Xaa = Any Amino Acid
ACXELCAXNXPAXCTGC

SEQ ID NO: 6423 - protein, 17 aa, Artificial Sequence
  Synthetically generated peptide
  VARIANT (1)..(17): Xaa = Any Amino Acid
ACXELCAXNXPACXTGC

SEQ ID NO: 6424 - protein, 17 aa, Artificial Sequence
  Synthetically generated peptide
  VARIANT (1)..(17): Xaa = Any Amino Acid
ACXELCAXNXPACTXGC

SEQ ID NO: 6425 - protein, 17 aa, Artificial Sequence
  Synthetically generated peptide
  VARIANT (1)..(17): Xaa = Any Amino Acid
ACXELCAXNXPACTGXC

SEQ ID NO: 6426 - protein, 16 aa, Artificial Sequence
  Synthetically generated peptide
  VARIANT (1)..(16): Xaa = Any Amino Acid
ACXELCAXNPXACTGC

SEQ ID NO: 6427 - protein, 17 aa, Artificial Sequence
  Synthetically generated peptide
  VARIANT (1)..(17): Xaa = Any Amino Acid
ACXELCAXNPXXACTGC

SEQ ID NO: 6428 - protein, 17 aa, Artificial Sequence
  Synthetically generated peptide
  VARIANT (1)..(17): Xaa = Any Amino Acid
ACXELCAXNPXAXCTGC

SEQ ID NO: 6429 - protein, 17 aa, Artificial Sequence
  Synthetically generated peptide
  VARIANT (1)..(17): Xaa = Any Amino Acid
ACXELCAXNPXACXTGC

SEQ ID NO: 6430 - protein, 17 aa, Artificial Sequence
  Synthetically generated peptide
  VARIANT (1)..(17): Xaa = Any Amino Acid
ACXELCAXNPXACTXGC

SEQ ID NO: 6431 - protein, 17 aa, Artificial Sequence
  Synthetically generated peptide
  VARIANT (1)..(17): Xaa = Any Amino Acid
ACXELCAXNPXACTGXC

SEQ ID NO: 6432 - protein, 16 aa, Artificial Sequence
  Synthetically generated peptide
  VARIANT (1)..(16): Xaa = Any Amino Acid
ACXELCAXNPAXCTGC

SEQ ID NO: 6433 - protein, 17 aa, Artificial Sequence
  Synthetically generated peptide
  VARIANT (1)..(17): Xaa = Any Amino Acid
ACXELCAXNPAXXCTGC

SEQ ID NO: 6434 - protein, 17 aa, Artificial Sequence
  Synthetically generated peptide
  VARIANT (1)..(17): Xaa = Any Amino Acid
ACXELCAXNPAXCXTGC

SEQ ID NO: 6435 - protein, 17 aa, Artificial Sequence
  Synthetically generated peptide
  VARIANT (1)..(17): Xaa = Any Amino Acid
ACXELCAXNPAXCTXGC

SEQ ID NO: 6436 - protein, 17 aa, Artificial Sequence
  Synthetically generated peptide
  VARIANT (1)..(17): Xaa = Any Amino Acid
ACXELCAXNPAXCTGXC

SEQ ID NO: 6437 - protein, 16 aa, Artificial Sequence
  Synthetically generated peptide
  VARIANT (1)..(16): Xaa = Any Amino Acid
ACXELCAXNPACXTGC

SEQ ID NO: 6438 - protein, 17 aa, Artificial Sequence
  Synthetically generated peptide
  VARIANT (1)..(17): Xaa = Any Amino Acid
ACXELCAXNPACXXTGC

SEQ ID NO: 6439 - protein, 17 aa, Artificial Sequence
  Synthetically generated peptide
  VARIANT (1)..(17): Xaa = Any Amino Acid
ACXELCAXNPACXTXGC

SEQ ID NO: 6440 - protein, 17 aa, Artificial Sequence
  Synthetically generated peptide
  VARIANT (1)..(17): Xaa = Any Amino Acid
ACXELCAXNPACXTGXC

SEQ ID NO: 6441 - protein, 16 aa, Artificial Sequence
  Synthetically generated peptide
  VARIANT (1)..(16): Xaa = Any Amino Acid
ACXELCAXNPACTXGC

SEQ ID NO: 6442 - protein, 17 aa, Artificial Sequence
  Synthetically generated peptide
  VARIANT (1)..(17): Xaa = Any Amino Acid
ACXELCAXNPACTXXGC

SEQ ID NO: 6443 - protein, 17 aa, Artificial Sequence
  Synthetically generated peptide
  VARIANT (1)..(17): Xaa = Any Amino Acid
ACXELCAXNPACTXGXC

SEQ ID NO: 6444 - protein, 16 aa, Artificial Sequence
  Synthetically generated peptide
  VARIANT (1)..(16): Xaa = Any Amino Acid
ACXELCAXNPACTGXC

SEQ ID NO: 6445 - protein, 17 aa, Artificial Sequence
  Synthetically generated peptide
  VARIANT (1)..(17): Xaa = Any Amino Acid
ACXELCAXNPACTGXXC

SEQ ID NO: 6446 - protein, 15 aa, Artificial Sequence
  Synthetically generated peptide
  VARIANT (1)..(15): Xaa = Any Amino Acid
ACXELCANXPACTGC

SEQ ID NO: 6447 - protein, 16 aa, Artificial Sequence
  Synthetically generated peptide
  VARIANT (1)..(16): Xaa = Any Amino Acid
ACXELCANXXPACTGC

SEQ ID NO: 6448 - protein, 17 aa, Artificial Sequence
  Synthetically generated peptide
  VARIANT (1)..(17): Xaa = Any Amino Acid
ACXELCANXXXPACTGC

SEQ ID NO: 6449 - protein, 17 aa, Artificial Sequence
  Synthetically generated peptide
  VARIANT (1)..(17): Xaa = Any Amino Acid
ACXELCANXXPXACTGC

SEQ ID NO: 6450 - protein, 17 aa, Artificial Sequence
  Synthetically generated peptide
  VARIANT (1)..(17): Xaa = Any Amino Acid
ACXELCANXXPAXCTGC

SEQ ID NO: 6451 - protein, 17 aa, Artificial Sequence
  Synthetically generated peptide
  VARIANT (1)..(17): Xaa = Any Amino Acid
ACXELCANXXPACXTGC

SEQ ID NO: 6452 - protein, 17 aa, Artificial Sequence
  Synthetically generated peptide
  VARIANT (1)..(17): Xaa = Any Amino Acid
ACXELCANXXPACTXGC

SEQ ID NO: 6453 - protein, 17 aa, Artificial Sequence
  Synthetically generated peptide
  VARIANT (1)..(17): Xaa = Any Amino Acid
ACXELCANXXPACTGXC

SEQ ID NO: 6454 - protein, 16 aa, Artificial Sequence
  Synthetically generated peptide
  VARIANT (1)..(16): Xaa = Any Amino Acid
ACXELCANXPXACTGC

SEQ ID NO: 6455 - protein, 17 aa, Artificial Sequence
  Synthetically generated peptide
  VARIANT (1)..(17): Xaa = Any Amino Acid
ACXELCANXPXXACTGC

SEQ ID NO: 6456 - protein, 17 aa, Artificial Sequence
  Synthetically generated peptide
  VARIANT (1)..(17): Xaa = Any Amino Acid
ACXELCANXPXAXCTGC

SEQ ID NO: 6457 - protein, 17 aa, Artificial Sequence
  Synthetically generated peptide
  VARIANT (1)..(17): Xaa = Any Amino Acid
ACXELCANXPXACXTGC

SEQ ID NO: 6458 - protein, 17 aa, Artificial Sequence
  Synthetically generated peptide
  VARIANT (1)..(17): Xaa = Any Amino Acid
ACXELCANXPXACTXGC

SEQ ID NO: 6459 - protein, 17 aa, Artificial Sequence
  Synthetically generated peptide
  VARIANT (1)..(17): Xaa = Any Amino Acid
ACXELCANXPXACTGXC

SEQ ID NO: 6460 - protein, 16 aa, Artificial Sequence
  Synthetically generated peptide
  VARIANT (1)..(16): Xaa = Any Amino Acid
ACXELCANXPAXCTGC

SEQ ID NO: 6461 - protein, 17 aa, Artificial Sequence
  Synthetically generated peptide
  VARIANT (1)..(17): Xaa = Any Amino Acid
ACXELCANXPAXXCTGC

SEQ ID NO: 6462 - protein, 17 aa, Artificial Sequence
  Synthetically generated peptide
  VARIANT (1)..(17): Xaa = Any Amino Acid
ACXELCANXPAXCXTGC

SEQ ID NO: 6463 - protein, 17 aa, Artificial Sequence
  Synthetically generated peptide
  VARIANT (1)..(17): Xaa = Any Amino Acid
ACXELCANXPAXCTXGC

SEQ ID NO: 6464 - protein, 17 aa, Artificial Sequence
  Synthetically generated peptide
  VARIANT (1)..(17): Xaa = Any Amino Acid
ACXELCANXPAXCTGXC

SEQ ID NO: 6465 - protein, 16 aa, Artificial Sequence
  Synthetically generated peptide
  VARIANT (1)..(16): Xaa = Any Amino Acid
ACXELCANXPACXTGC

SEQ ID NO: 6466 - protein, 17 aa, Artificial Sequence
  Synthetically generated peptide
  VARIANT (1)..(17): Xaa = Any Amino Acid
ACXELCANXPACXXTGC

SEQ ID NO: 6467 - protein, 17 aa, Artificial Sequence
  Synthetically generated peptide
  VARIANT (1)..(17): Xaa = Any Amino Acid
ACXELCANXPACXTXGC

SEQ ID NO: 6468 - protein, 17 aa, Artificial Sequence
  Synthetically generated peptide
  VARIANT (1)..(17): Xaa = Any Amino Acid
ACXELCANXPACXTGXC

SEQ ID NO: 6469 - protein, 16 aa, Artificial Sequence
  Synthetically generated peptide
  VARIANT (1)..(16): Xaa = Any Amino Acid
ACXELCANXPACTXGC

SEQ ID NO: 6470 - protein, 17 aa, Artificial Sequence
  Synthetically generated peptide
  VARIANT (1)..(17): Xaa = Any Amino Acid
ACXELCANXPACTXXGC

SEQ ID NO: 6471 - protein, 17 aa, Artificial Sequence
  Synthetically generated peptide
  VARIANT (1)..(17): Xaa = Any Amino Acid
ACXELCANXPACTXGXC

SEQ ID NO: 6472 - protein, 16 aa, Artificial Sequence
  Synthetically generated peptide
  VARIANT (1)..(16): Xaa = Any Amino Acid
ACXELCANXPACTGXC

SEQ ID NO: 6473 - protein, 17 aa, Artificial Sequence
  Synthetically generated peptide
  VARIANT (1)..(17): Xaa = Any Amino Acid
ACXELCANXPACTGXXC

SEQ ID NO: 6474 - protein, 15 aa, Artificial Sequence
  Synthetically generated peptide
  VARIANT (1)..(15): Xaa = Any Amino Acid
ACXELCANPXACTGC

SEQ ID NO: 6475 - protein, 16 aa, Artificial Sequence
  Synthetically generated peptide
  VARIANT (1)..(16): Xaa = Any Amino Acid
ACXELCANPXXACTGC

SEQ ID NO: 6476 - protein, 17 aa, Artificial Sequence
  Synthetically generated peptide
  VARIANT (1)..(17): Xaa = Any Amino Acid
ACXELCANPXXXACTGC

SEQ ID NO: 6477 - protein, 17 aa, Artificial Sequence
  Synthetically generated peptide
  VARIANT (1)..(17): Xaa = Any Amino Acid
ACXELCANPXXAXCTGC

SEQ ID NO: 6478 - protein, 17 aa, Artificial Sequence
  Synthetically generated peptide
  VARIANT (1)..(17): Xaa = Any Amino Acid
ACXELCANPXXACXTGC

SEQ ID NO: 6479 - protein, 17 aa, Artificial Sequence
  Synthetically generated peptide
  VARIANT (1)..(17): Xaa = Any Amino Acid
ACXELCANPXXACTXGC

SEQ ID NO: 6480 - protein, 17 aa, Artificial Sequence
  Synthetically generated peptide
  VARIANT (1)..(17): Xaa = Any Amino Acid
ACXELCANPXXACTGXC

SEQ ID NO: 6481 - protein, 16 aa, Artificial Sequence
  Synthetically generated peptide
  VARIANT (1)..(16): Xaa = Any Amino Acid
ACXELCANPXAXCTGC

SEQ ID NO: 6482 - protein, 17 aa, Artificial Sequence
  Synthetically generated peptide
  VARIANT (1)..(17): Xaa = Any Amino Acid
ACXELCANPXAXXCTGC

SEQ ID NO: 6483 - protein, 17 aa, Artificial Sequence
  Synthetically generated peptide
  VARIANT (1)..(17): Xaa = Any Amino Acid
ACXELCANPXAXCXTGC

SEQ ID NO: 6484 - protein, 17 aa, Artificial Sequence
  Synthetically generated peptide
  VARIANT (1)..(17): Xaa = Any Amino Acid
ACXELCANPXAXCTXGC

SEQ ID NO: 6485 - protein, 17 aa, Artificial Sequence
  Synthetically generated peptide
  VARIANT (1)..(17): Xaa = Any Amino Acid
ACXELCANPXAXCTGXC

SEQ ID NO: 6486 - protein, 16 aa, Artificial Sequence
  Synthetically generated peptide
  VARIANT (1)..(16): Xaa = Any Amino Acid
ACXELCANPXACXTGC

SEQ ID NO: 6487 - protein, 17 aa, Artificial Sequence
  Synthetically generated peptide
  VARIANT (1)..(17): Xaa = Any Amino Acid
ACXELCANPXACXXTGC

SEQ ID NO: 6488 - protein, 17 aa, Artificial Sequence
  Synthetically generated peptide
  VARIANT (1)..(17): Xaa = Any Amino Acid
ACXELCANPXACXTXGC

SEQ ID NO: 6489 - protein, 17 aa, Artificial Sequence
  Synthetically generated peptide
  VARIANT (1)..(17): Xaa = Any Amino Acid
ACXELCANPXACXTGXC

SEQ ID NO: 6490 - protein, 16 aa, Artificial Sequence
  Synthetically generated peptide
  VARIANT (1)..(16): Xaa = Any Amino Acid
ACXELCANPXACTXGC

SEQ ID NO: 6491 - protein, 17 aa, Artificial Sequence
  Synthetically generated peptide
  VARIANT (1)..(17): Xaa = Any Amino Acid
ACXELCANPXACTXXGC

SEQ ID NO: 6492 - protein, 17 aa, Artificial Sequence
  Synthetically generated peptide
  VARIANT (1)..(17): Xaa = Any Amino Acid
ACXELCANPXACTXGXC

SEQ ID NO: 6493 - protein, 16 aa, Artificial Sequence
  Synthetically generated peptide
  VARIANT (1)..(16): Xaa = Any Amino Acid
ACXELCANPXACTGXC

SEQ ID NO: 6494 - protein, 17 aa, Artificial Sequence
  Synthetically generated peptide
  VARIANT (1)..(17): Xaa = Any Amino Acid
ACXELCANPXACTGXXC

SEQ ID NO: 6495 - protein, 15 aa, Artificial Sequence
  Synthetically generated peptide
  VARIANT (1)..(15): Xaa = Any Amino Acid
ACXELCANPAXCTGC

SEQ ID NO: 6496 - protein, 16 aa, Artificial Sequence
  Synthetically generated peptide
  VARIANT (1)..(16): Xaa = Any Amino Acid
ACXELCANPAXXCTGC

SEQ ID NO: 6497 - protein, 17 aa, Artificial Sequence
  Synthetically generated peptide
  VARIANT (1)..(17): Xaa = Any Amino Acid
ACXELCANPAXXXCTGC

SEQ ID NO: 6498 - protein, 17 aa, Artificial Sequence
  Synthetically generated peptide
  VARIANT (1)..(17): Xaa = Any Amino Acid
ACXELCANPAXXCXTGC

SEQ ID NO: 6499 - protein, 17 aa, Artificial Sequence
  Synthetically generated peptide
  VARIANT (1)..(17): Xaa = Any Amino Acid
ACXELCANPAXXCTXGC

SEQ ID NO: 6500 - protein, 17 aa, Artificial Sequence
  Synthetically generated peptide
  VARIANT (1)..(17): Xaa = Any Amino Acid
ACXELCANPAXXCTGXC

SEQ ID NO: 6501 - protein, 16 aa, Artificial Sequence
  Synthetically generated peptide
  VARIANT (1)..(16): Xaa = Any Amino Acid
ACXELCANPAXCXTGC

SEQ ID NO: 6502 - protein, 17 aa, Artificial Sequence
  Synthetically generated peptide
  VARIANT (1)..(17): Xaa = Any Amino Acid
ACXELCANPAXCXXTGC

SEQ ID NO: 6503 - protein, 17 aa, Artificial Sequence
  Synthetically generated peptide
  VARIANT (1)..(17): Xaa = Any Amino Acid
ACXELCANPAXCXTXGC

SEQ ID NO: 6504 - protein, 17 aa, Artificial Sequence
  Synthetically generated peptide
  VARIANT (1)..(17): Xaa = Any Amino Acid
ACXELCANPAXCXTGXC

SEQ ID NO: 6505 - protein, 16 aa, Artificial Sequence
  Synthetically generated peptide
  VARIANT (1)..(16): Xaa = Any Amino Acid
ACXELCANPAXCTXGC

SEQ ID NO: 6506 - protein, 17 aa, Artificial Sequence
  Synthetically generated peptide
  VARIANT (1)..(17): Xaa = Any Amino Acid
ACXELCANPAXCTXXGC

SEQ ID NO: 6507 - protein, 17 aa, Artificial Sequence
  Synthetically generated peptide
  VARIANT (1)..(17): Xaa = Any Amino Acid
ACXELCANPAXCTXGXC

SEQ ID NO: 6508 - protein, 16 aa, Artificial Sequence
  Synthetically generated peptide
  VARIANT (1)..(16): Xaa = Any Amino Acid
ACXELCANPAXCTGXC

SEQ ID NO: 6509 - protein, 17 aa, Artificial Sequence
  Synthetically generated peptide
  VARIANT (1)..(17): Xaa = Any Amino Acid
ACXELCANPAXCTGXXC

SEQ ID NO: 6510 - protein, 15 aa, Artificial Sequence
  Synthetically generated peptide
  VARIANT (1)..(15): Xaa = Any Amino Acid
ACXELCANPACXTGC

SEQ ID NO: 6511 - protein, 16 aa, Artificial Sequence
  Synthetically generated peptide
  VARIANT (1)..(16): Xaa = Any Amino Acid
ACXELCANPACXXTGC

SEQ ID NO: 6512 - protein, 17 aa, Artificial Sequence
  Synthetically generated peptide
  VARIANT (1)..(17): Xaa = Any Amino Acid
ACXELCANPACXXXTGC

SEQ ID NO: 6513 - protein, 17 aa, Artificial Sequence
  Synthetically generated peptide
  VARIANT (1)..(17): Xaa = Any Amino Acid
ACXELCANPACXXTXGC

SEQ ID NO: 6514 - protein, 17 aa, Artificial Sequence
  Synthetically generated peptide
  VARIANT (1)..(17): Xaa = Any Amino Acid
ACXELCANPACXXTGXC

SEQ ID NO: 6515 - protein, 16 aa, Artificial Sequence
  Synthetically generated peptide
  VARIANT (1)..(16): Xaa = Any Amino Acid
ACXELCANPACXTXGC

SEQ ID NO: 6516 - protein, 17 aa, Artificial Sequence
  Synthetically generated peptide
  VARIANT (1)..(17): Xaa = Any Amino Acid
ACXELCANPACXTXXGC

SEQ ID NO: 6517 - protein, 17 aa, Artificial Sequence
  Synthetically generated peptide
  VARIANT (1)..(17): Xaa = Any Amino Acid
ACXELCANPACXTXGXC

SEQ ID NO: 6518 - protein, 16 aa, Artificial Sequence
  Synthetically generated peptide
  VARIANT (1)..(16): Xaa = Any Amino Acid
ACXELCANPACXTGXC

SEQ ID NO: 6519 - protein, 17 aa, Artificial Sequence
  Synthetically generated peptide
  VARIANT (1)..(17): Xaa = Any Amino Acid
ACXELCANPACXTGXXC

SEQ ID NO: 6520 - protein, 15 aa, Artificial Sequence
  Synthetically generated peptide
  VARIANT (1)..(15): Xaa = Any Amino Acid
ACXELCANPACTXGC

SEQ ID NO: 6521 - protein, 16 aa, Artificial Sequence
  Synthetically generated peptide
  VARIANT (1)..(16): Xaa = Any Amino Acid
ACXELCANPACTXXGC

SEQ ID NO: 6522 - protein, 17 aa, Artificial Sequence
  Synthetically generated peptide
  VARIANT (1)..(17): Xaa = Any Amino Acid
ACXELCANPACTXXXGC

SEQ ID NO: 6523 - protein, 17 aa, Artificial Sequence
  Synthetically generated peptide
  VARIANT (1)..(17): Xaa = Any Amino Acid
ACXELCANPACTXXGXC

SEQ ID NO: 6524 - protein, 16 aa, Artificial Sequence
  Synthetically generated peptide
  VARIANT (1)..(16): Xaa = Any Amino Acid
ACXELCANPACTXGXC

SEQ ID NO: 6525 - protein, 17 aa, Artificial Sequence
  Synthetically generated peptide
  VARIANT (1)..(17): Xaa = Any Amino Acid
ACXELCANPACTXGXXC

SEQ ID NO: 6526 - protein, 15 aa, Artificial Sequence
  Synthetically generated peptide
  VARIANT (1)..(15): Xaa = Any Amino Acid
ACXELCANPACTGXC

SEQ ID NO: 6527 - protein, 16 aa, Artificial Sequence
  Synthetically generated peptide
  VARIANT (1)..(16): Xaa = Any Amino Acid
ACXELCANPACTGXXC

SEQ ID NO: 6528 - protein, 17 aa, Artificial Sequence
  Synthetically generated peptide
  VARIANT (1)..(17): Xaa = Any Amino Acid
ACXELCANPACTGXXXC

SEQ ID NO: 6529 - protein, 14 aa, Artificial Sequence
  Synthetically generated peptide
  VARIANT (1)..(14): Xaa = Any Amino Acid
ACEXLCANPACTGC

SEQ ID NO: 6530 - protein, 15 aa, Artificial Sequence
  Synthetically generated peptide
  VARIANT (1)..(15): Xaa = Any Amino Acid
ACEXXLCANPACTGC

SEQ ID NO: 6531 - protein, 16 aa, Artificial Sequence
  Synthetically generated peptide
  VARIANT (1)..(16): Xaa = Any Amino Acid
ACEXXXLCANPACTGC

SEQ ID NO: 6532 - protein, 17 aa, Artificial Sequence
  Synthetically generated peptide
  VARIANT (1)..(17): Xaa = Any Amino Acid
ACEXXXXLCANPACTGC

SEQ ID NO: 6533 - protein, 17 aa, Artificial Sequence
  Synthetically generated peptide
  VARIANT (1)..(17): Xaa = Any Amino Acid
ACEXXXLXCANPACTGC

SEQ ID NO: 6534 - protein, 17 aa, Artificial Sequence
  Synthetically generated peptide
  VARIANT (1)..(17): Xaa = Any Amino Acid
ACEXXXLCAXNPACTGC

SEQ ID NO: 6535 - protein, 17 aa, Artificial Sequence
  Synthetically generated peptide
  VARIANT (1)..(17): Xaa = Any Amino Acid
ACEXXXLCANXPACTGC

SEQ ID NO: 6536 - protein, 17 aa, Artificial Sequence
  Synthetically generated peptide
  VARIANT (1)..(17): Xaa = Any Amino Acid
ACEXXXLCANPXACTGC

SEQ ID NO: 6537 - protein, 17 aa, Artificial Sequence
  Synthetically generated peptide
  VARIANT (1)..(17): Xaa = Any Amino Acid
ACEXXXLCANPAXCTGC

SEQ ID NO: 6538 - protein, 17 aa, Artificial Sequence
  Synthetically generated peptide
  VARIANT (1)..(17): Xaa = Any Amino Acid
ACEXXXLCANPACXTGC

SEQ ID NO: 6539 - protein, 17 aa, Artificial Sequence
  Synthetically generated peptide
  VARIANT (1)..(17): Xaa = Any Amino Acid
ACEXXXLCANPACTXGC

SEQ ID NO: 6540 - protein, 17 aa, Artificial Sequence
  Synthetically generated peptide
  VARIANT (1)..(17): Xaa = Any Amino Acid
ACEXXXLCANPACTGXC

SEQ ID NO: 6541 - protein, 16 aa, Artificial Sequence
  Synthetically generated peptide
  VARIANT (1)..(16): Xaa = Any Amino Acid
ACEXXLXCANPACTGC

SEQ ID NO: 6542 - protein, 17 aa, Artificial Sequence
  Synthetically generated peptide
  VARIANT (1)..(17): Xaa = Any Amino Acid
ACEXXLXXCANPACTGC

SEQ ID NO: 6543 - protein, 17 aa, Artificial Sequence
  Synthetically generated peptide
  VARIANT (1)..(17): Xaa = Any Amino Acid
ACEXXLXCAXNPACTGC

SEQ ID NO: 6544 - protein, 17 aa, Artificial Sequence
  Synthetically generated peptide
  VARIANT (1)..(17): Xaa = Any Amino Acid
ACEXXLXCANXPACTGC

SEQ ID NO: 6545 - protein, 17 aa, Artificial Sequence
  Synthetically generated peptide
  VARIANT (1)..(17): Xaa = Any Amino Acid
ACEXXLXCANPXACTGC

SEQ ID NO: 6546 - protein, 17 aa, Artificial Sequence
  Synthetically generated peptide
  VARIANT (1)..(17): Xaa = Any Amino Acid
ACEXXLXCANPAXCTGC

SEQ ID NO: 6547 - protein, 17 aa, Artificial Sequence
  Synthetically generated peptide
  VARIANT (1)..(17): Xaa = Any Amino Acid
ACEXXLXCANPACXTGC

SEQ ID NO: 6548 - protein, 17 aa, Artificial Sequence
  Synthetically generated peptide
  VARIANT (1)..(17): Xaa = Any Amino Acid
ACEXXLXCANPACTXGC

SEQ ID NO: 6549 - protein, 17 aa, Artificial Sequence
  Synthetically generated peptide
  VARIANT (1)..(17): Xaa = Any Amino Acid
ACEXXLXCANPACTGXC

SEQ ID NO: 6550 - protein, 16 aa, Artificial Sequence
  Synthetically generated peptide
  VARIANT (1)..(16): Xaa = Any Amino Acid
ACEXXLCAXNPACTGC

SEQ ID NO: 6551 - protein, 17 aa, Artificial Sequence
  Synthetically generated peptide
  VARIANT (1)..(17): Xaa = Any Amino Acid
ACEXXLCAXXNPACTGC

SEQ ID NO: 6552 - protein, 17 aa, Artificial Sequence
  Synthetically generated peptide
  VARIANT (1)..(17): Xaa = Any Amino Acid
ACEXXLCAXNXPACTGC

SEQ ID NO: 6553 - protein, 17 aa, Artificial Sequence
  Synthetically generated peptide
  VARIANT (1)..(17): Xaa = Any Amino Acid
ACEXXLCAXNPXACTGC

SEQ ID NO: 6554 - protein, 17 aa, Artificial Sequence
  Synthetically generated peptide
  VARIANT (1)..(17): Xaa = Any Amino Acid
ACEXXLCAXNPAXCTGC

SEQ ID NO: 6555 - protein, 17 aa, Artificial Sequence
  Synthetically generated peptide
  VARIANT (1)..(17): Xaa = Any Amino Acid
ACEXXLCAXNPACXTGC

SEQ ID NO: 6556 - protein, 17 aa, Artificial Sequence
  Synthetically generated peptide
  VARIANT (1)..(17): Xaa = Any Amino Acid
ACEXXLCAXNPACTXGC

SEQ ID NO: 6557 - protein, 17 aa, Artificial Sequence
  Synthetically generated peptide
  VARIANT (1)..(17): Xaa = Any Amino Acid
ACEXXLCAXNPACTGXC

SEQ ID NO: 6558 - protein, 16 aa, Artificial Sequence
  Synthetically generated peptide
  VARIANT (1)..(16): Xaa = Any Amino Acid
ACEXXLCANXPACTGC

SEQ ID NO: 6559 - protein, 17 aa, Artificial Sequence
  Synthetically generated peptide
  VARIANT (1)..(17): Xaa = Any Amino Acid
ACEXXLCANXXPACTGC

SEQ ID NO: 6560 - protein, 17 aa, Artificial Sequence
  Synthetically generated peptide
  VARIANT (1)..(17): Xaa = Any Amino Acid
ACEXXLCANXPXACTGC

SEQ ID NO: 6561 - protein, 17 aa, Artificial Sequence
  Synthetically generated peptide
  VARIANT (1)..(17): Xaa = Any Amino Acid
ACEXXLCANXPAXCTGC

SEQ ID NO: 6562 - protein, 17 aa, Artificial Sequence
  Synthetically generated peptide
  VARIANT (1)..(17): Xaa = Any Amino Acid
ACEXXLCANXPACXTGC

SEQ ID NO: 6563 - protein, 17 aa, Artificial Sequence
  Synthetically generated peptide
  VARIANT (1)..(17): Xaa = Any Amino Acid
ACEXXLCANXPACTXGC

SEQ ID NO: 6564 - protein, 17 aa, Artificial Sequence
  Synthetically generated peptide
  VARIANT (1)..(17): Xaa = Any Amino Acid
ACEXXLCANXPACTGXC

SEQ ID NO: 6565 - protein, 16 aa, Artificial Sequence
  Synthetically generated peptide
  VARIANT (1)..(16): Xaa = Any Amino Acid
ACEXXLCANPXACTGC

SEQ ID NO: 6566 - protein, 17 aa, Artificial Sequence
  Synthetically generated peptide
  VARIANT (1)..(17): Xaa = Any Amino Acid
ACEXXLCANPXXACTGC

SEQ ID NO: 6567 - protein, 17 aa, Artificial Sequence
  Synthetically generated peptide
  VARIANT (1)..(17): Xaa = Any Amino Acid
ACEXXLCANPXAXCTGC

SEQ ID NO: 6568 - protein, 17 aa, Artificial Sequence
  Synthetically generated peptide
  VARIANT (1)..(17): Xaa = Any Amino Acid
ACEXXLCANPXACXTGC

SEQ ID NO: 6569 - protein, 17 aa, Artificial Sequence
  Synthetically generated peptide
  VARIANT (1)..(17): Xaa = Any Amino Acid
ACEXXLCANPXACTXGC

SEQ ID NO: 6570 - protein, 17 aa, Artificial Sequence
  Synthetically generated peptide
  VARIANT (1)..(17): Xaa = Any Amino Acid
ACEXXLCANPXACTGXC

SEQ ID NO: 6571 - protein, 16 aa, Artificial Sequence
  Synthetically generated peptide
  VARIANT (1)..(16): Xaa = Any Amino Acid
ACEXXLCANPAXCTGC

SEQ ID NO: 6572 - protein, 17 aa, Artificial Sequence
  Synthetically generated peptide
  VARIANT (1)..(17): Xaa = Any Amino Acid
ACEXXLCANPAXXCTGC

SEQ ID NO: 6573 - protein, 17 aa, Artificial Sequence
  Synthetically generated peptide
  VARIANT (1)..(17): Xaa = Any Amino Acid
ACEXXLCANPAXCXTGC

SEQ ID NO: 6574 - protein, 17 aa, Artificial Sequence
  Synthetically generated peptide
  VARIANT (1)..(17): Xaa = Any Amino Acid
ACEXXLCANPAXCTXGC

SEQ ID NO: 6575 - protein, 17 aa, Artificial Sequence
  Synthetically generated peptide
  VARIANT (1)..(17): Xaa = Any Amino Acid
ACEXXLCANPAXCTGXC

SEQ ID NO: 6576 - protein, 16 aa, Artificial Sequence
  Synthetically generated peptide
  VARIANT (1)..(16): Xaa = Any Amino Acid
ACEXXLCANPACXTGC

SEQ ID NO: 6577 - protein, 17 aa, Artificial Sequence
  Synthetically generated peptide
  VARIANT (1)..(17): Xaa = Any Amino Acid
ACEXXLCANPACXXTGC

SEQ ID NO: 6578 - protein, 17 aa, Artificial Sequence
  Synthetically generated peptide
  VARIANT (1)..(17): Xaa = Any Amino Acid
ACEXXLCANPACXTXGC

SEQ ID NO: 6579 - protein, 17 aa, Artificial Sequence
  Synthetically generated peptide
  VARIANT (1)..(17): Xaa = Any Amino Acid
ACEXXLCANPACXTGXC

SEQ ID NO: 6580 - protein, 16 aa, Artificial Sequence
  Synthetically generated peptide
  VARIANT (1)..(16): Xaa = Any Amino Acid
ACEXXLCANPACTXGC

SEQ ID NO: 6581 - protein, 17 aa, Artificial Sequence
  Synthetically generated peptide
  VARIANT (1)..(17): Xaa = Any Amino Acid
ACEXXLCANPACTXXGC

SEQ ID NO: 6582 - protein, 17 aa, Artificial Sequence
  Synthetically generated peptide
  VARIANT (1)..(17): Xaa = Any Amino Acid
ACEXXLCANPACTXGXC

SEQ ID NO: 6583 - protein, 16 aa, Artificial Sequence
  Synthetically generated peptide
  VARIANT (1)..(16): Xaa = Any Amino Acid
ACEXXLCANPACTGXC

SEQ ID NO: 6584 - protein, 17 aa, Artificial Sequence
  Synthetically generated peptide
  VARIANT (1)..(17): Xaa = Any Amino Acid
ACEXXLCANPACTGXXC

SEQ ID NO: 6585 - protein, 15 aa, Artificial Sequence
  Synthetically generated peptide
  VARIANT (1)..(15): Xaa = Any Amino Acid
ACEXLXCANPACTGC

SEQ ID NO: 6586 - protein, 16 aa, Artificial Sequence
  Synthetically generated peptide
  VARIANT (1)..(16): Xaa = Any Amino Acid
ACEXLXXCANPACTGC

SEQ ID NO: 6587 - protein, 17 aa, Artificial Sequence
  Synthetically generated peptide
  VARIANT (1)..(17): Xaa = Any Amino Acid
ACEXLXXXCANPACTGC

SEQ ID NO: 6588 - protein, 17 aa, Artificial Sequence
  Synthetically generated peptide
  VARIANT (1)..(17): Xaa = Any Amino Acid
ACEXLXXCAXNPACTGC

SEQ ID NO: 6589 - protein, 17 aa, Artificial Sequence
  Synthetically generated peptide
  VARIANT (1)..(17): Xaa = Any Amino Acid
ACEXLXXCANXPACTGC

SEQ ID NO: 6590 - protein, 17 aa, Artificial Sequence
  Synthetically generated peptide
  VARIANT (1)..(17): Xaa = Any Amino Acid
ACEXLXXCANPXACTGC

SEQ ID NO: 6591 - protein, 17 aa, Artificial Sequence
  Synthetically generated peptide
  VARIANT (1)..(17): Xaa = Any Amino Acid
ACEXLXXCANPAXCTGC

SEQ ID NO: 6592 - protein, 17 aa, Artificial Sequence
  Synthetically generated peptide
  VARIANT (1)..(17): Xaa = Any Amino Acid
ACEXLXXCANPACXTGC

SEQ ID NO: 6593 - protein, 17 aa, Artificial Sequence
  Synthetically generated peptide
  VARIANT (1)..(17): Xaa = Any Amino Acid
ACEXLXXCANPACTXGC

SEQ ID NO: 6594 - protein, 17 aa, Artificial Sequence
  Synthetically generated peptide
  VARIANT (1)..(17): Xaa = Any Amino Acid
ACEXLXXCANPACTGXC

SEQ ID NO: 6595 - protein, 16 aa, Artificial Sequence
  Synthetically generated peptide
  VARIANT (1)..(16): Xaa = Any Amino Acid
ACEXLXCAXNPACTGC

SEQ ID NO: 6596 - protein, 17 aa, Artificial Sequence
  Synthetically generated peptide
  VARIANT (1)..(17): Xaa = Any Amino Acid
ACEXLXCAXXNPACTGC

SEQ ID NO: 6597 - protein, 17 aa, Artificial Sequence
  Synthetically generated peptide
  VARIANT (1)..(17): Xaa = Any Amino Acid
ACEXLXCAXNXPACTGC

SEQ ID NO: 6598 - protein, 17 aa, Artificial Sequence
  Synthetically generated peptide
  VARIANT (1)..(17): Xaa = Any Amino Acid
ACEXLXCAXNPXACTGC

SEQ ID NO: 6599 - protein, 17 aa, Artificial Sequence
  Synthetically generated peptide
  VARIANT (1)..(17): Xaa = Any Amino Acid
ACEXLXCAXNPAXCTGC

SEQ ID NO: 6600 - protein, 17 aa, Artificial Sequence
  Synthetically generated peptide
  VARIANT (1)..(17): Xaa = Any Amino Acid
ACEXLXCAXNPACXTGC

SEQ ID NO: 6601 - protein, 17 aa, Artificial Sequence
  Synthetically generated peptide
  VARIANT (1)..(17): Xaa = Any Amino Acid
ACEXLXCAXNPACTXGC

SEQ ID NO: 6602 - protein, 17 aa, Artificial Sequence
  Synthetically generated peptide
  VARIANT (1)..(17): Xaa = Any Amino Acid
ACEXLXCAXNPACTGXC

SEQ ID NO: 6603 - protein, 16 aa, Artificial Sequence
  Synthetically generated peptide
  VARIANT (1)..(16): Xaa = Any Amino Acid
ACEXLXCANXPACTGC

SEQ ID NO: 6604 - protein, 17 aa, Artificial Sequence
  Synthetically generated peptide
  VARIANT (1)..(17): Xaa = Any Amino Acid
ACEXLXCANXXPACTGC

SEQ ID NO: 6605 - protein, 17 aa, Artificial Sequence
  Synthetically generated peptide
  VARIANT (1)..(17): Xaa = Any Amino Acid
ACEXLXCANXPXACTGC

SEQ ID NO: 6606 - protein, 17 aa, Artificial Sequence
  Synthetically generated peptide
  VARIANT (1)..(17): Xaa = Any Amino Acid
ACEXLXCANXPAXCTGC

SEQ ID NO: 6607 - protein, 17 aa, Artificial Sequence
  Synthetically generated peptide
  VARIANT (1)..(17): Xaa = Any Amino Acid
ACEXLXCANXPACXTGC

SEQ ID NO: 6608 - protein, 17 aa, Artificial Sequence
  Synthetically generated peptide
  VARIANT (1)..(17): Xaa = Any Amino Acid
ACEXLXCANXPACTXGC

SEQ ID NO: 6609 - protein, 17 aa, Artificial Sequence
  Synthetically generated peptide
  VARIANT (1)..(17): Xaa = Any Amino Acid
ACEXLXCANXPACTGXC

SEQ ID NO: 6610 - protein, 16 aa, Artificial Sequence
  Synthetically generated peptide
  VARIANT (1)..(16): Xaa = Any Amino Acid
ACEXLXCANPXACTGC

SEQ ID NO: 6611 - protein, 17 aa, Artificial Sequence
  Synthetically generated peptide
  VARIANT (1)..(17): Xaa = Any Amino Acid
ACEXLXCANPXXACTGC

SEQ ID NO: 6612 - protein, 17 aa, Artificial Sequence
  Synthetically generated peptide
  VARIANT (1)..(17): Xaa = Any Amino Acid
ACEXLXCANPXAXCTGC

SEQ ID NO: 6613 - protein, 17 aa, Artificial Sequence
  Synthetically generated peptide
  VARIANT (1)..(17): Xaa = Any Amino Acid
ACEXLXCANPXACXTGC

SEQ ID NO: 6614 - protein, 17 aa, Artificial Sequence
  Synthetically generated peptide
  VARIANT (1)..(17): Xaa = Any Amino Acid
ACEXLXCANPXACTXGC

SEQ ID NO: 6615 - protein, 17 aa, Artificial Sequence
  Synthetically generated peptide
  VARIANT (1)..(17): Xaa = Any Amino Acid
ACEXLXCANPXACTGXC

SEQ ID NO: 6616 - protein, 16 aa, Artificial Sequence
  Synthetically generated peptide
  VARIANT (1)..(16): Xaa = Any Amino Acid
ACEXLXCANPAXCTGC

SEQ ID NO: 6617 - protein, 17 aa, Artificial Sequence
  Synthetically generated peptide
  VARIANT (1)..(17): Xaa = Any Amino Acid
ACEXLXCANPAXXCTGC

SEQ ID NO: 6618 - protein, 17 aa, Artificial Sequence
  Synthetically generated peptide
  VARIANT (1)..(17): Xaa = Any Amino Acid
ACEXLXCANPAXCXTGC

SEQ ID NO: 6619 - protein, 17 aa, Artificial Sequence
  Synthetically generated peptide
  VARIANT (1)..(17): Xaa = Any Amino Acid
ACEXLXCANPAXCTXGC

SEQ ID NO: 6620 - protein, 17 aa, Artificial Sequence
  Synthetically generated peptide
  VARIANT (1)..(17): Xaa = Any Amino Acid
ACEXLXCANPAXCTGXC

SEQ ID NO: 6621 - protein, 16 aa, Artificial Sequence
  Synthetically generated peptide
  VARIANT (1)..(16): Xaa = Any Amino Acid
ACEXLXCANPACXTGC

SEQ ID NO: 6622 - protein, 17 aa, Artificial Sequence
  Synthetically generated peptide
  VARIANT (1)..(17): Xaa = Any Amino Acid
ACEXLXCANPACXXTGC

SEQ ID NO: 6623 - protein, 17 aa, Artificial Sequence
  Synthetically generated peptide
  VARIANT (1)..(17): Xaa = Any Amino Acid
ACEXLXCANPACXTXGC

SEQ ID NO: 6624 - protein, 17 aa, Artificial Sequence
  Synthetically generated peptide
  VARIANT (1)..(17): Xaa = Any Amino Acid
ACEXLXCANPACXTGXC

SEQ ID NO: 6625 - protein, 16 aa, Artificial Sequence
  Synthetically generated peptide
  VARIANT (1)..(16): Xaa = Any Amino Acid
ACEXLXCANPACTXGC

SEQ ID NO: 6626 - protein, 17 aa, Artificial Sequence
  Synthetically generated peptide
  VARIANT (1)..(17): Xaa = Any Amino Acid
ACEXLXCANPACTXXGC

SEQ ID NO: 6627 - protein, 17 aa, Artificial Sequence
  Synthetically generated peptide
  VARIANT (1)..(17): Xaa = Any Amino Acid
ACEXLXCANPACTXGXC

SEQ ID NO: 6628 - protein, 16 aa, Artificial Sequence
  Synthetically generated peptide
  VARIANT (1)..(16): Xaa = Any Amino Acid
ACEXLXCANPACTGXC

SEQ ID NO: 6629 - protein, 17 aa, Artificial Sequence
  Synthetically generated peptide
  VARIANT (1)..(17): Xaa = Any Amino Acid
ACEXLXCANPACTGXXC

SEQ ID NO: 6630 - protein, 15 aa, Artificial Sequence
  Synthetically generated peptide
  VARIANT (1)..(15): Xaa = Any Amino Acid
ACEXLCAXNPACTGC

SEQ ID NO: 6631 - protein, 16 aa, Artificial Sequence
  Synthetically generated peptide
  VARIANT (1)..(16): Xaa = Any Amino Acid
ACEXLCAXXNPACTGC

SEQ ID NO: 6632 - protein, 17 aa, Artificial Sequence
  Synthetically generated peptide
  VARIANT (1)..(17): Xaa = Any Amino Acid
ACEXLCAXXXNPACTGC

SEQ ID NO: 6633 - protein, 17 aa, Artificial Sequence
  Synthetically generated peptide
  VARIANT (1)..(17): Xaa = Any Amino Acid
ACEXLCAXXNXPACTGC

SEQ ID NO: 6634 - protein, 17 aa, Artificial Sequence
  Synthetically generated peptide
  VARIANT (1)..(17): Xaa = Any Amino Acid
ACEXLCAXXNPXACTGC

SEQ ID NO: 6635 - protein, 17 aa, Artificial Sequence
  Synthetically generated peptide
  VARIANT (1)..(17): Xaa = Any Amino Acid
ACEXLCAXXNPAXCTGC

SEQ ID NO: 6636 - protein, 17 aa, Artificial Sequence
  Synthetically generated peptide
  VARIANT (1)..(17): Xaa = Any Amino Acid
ACEXLCAXXNPACXTGC

SEQ ID NO: 6637 - protein, 17 aa, Artificial Sequence
  Synthetically generated peptide
  VARIANT (1)..(17): Xaa = Any Amino Acid
ACEXLCAXXNPACTXGC

SEQ ID NO: 6638 - protein, 17 aa, Artificial Sequence
  Synthetically generated peptide
  VARIANT (1)..(17): Xaa = Any Amino Acid
ACEXLCAXXNPACTGXC

SEQ ID NO: 6639 - protein, 16 aa, Artificial Sequence
  Synthetically generated peptide
  VARIANT (1)..(16): Xaa = Any Amino Acid
ACEXLCAXNXPACTGC

SEQ ID NO: 6640 - protein, 17 aa, Artificial Sequence
  Synthetically generated peptide
  VARIANT (1)..(17): Xaa = Any Amino Acid
ACEXLCAXNXXPACTGC

SEQ ID NO: 6641 - protein, 17 aa, Artificial Sequence
  Synthetically generated peptide
  VARIANT (1)..(17): Xaa = Any Amino Acid
ACEXLCAXNXPXACTGC

SEQ ID NO: 6642 - protein, 17 aa, Artificial Sequence
  Synthetically generated peptide
  VARIANT (1)..(17): Xaa = Any Amino Acid
ACEXLCAXNXPAXCTGC

SEQ ID NO: 6643 - protein, 17 aa, Artificial Sequence
  Synthetically generated peptide
  VARIANT (1)..(17): Xaa = Any Amino Acid
ACEXLCAXNXPACXTGC

SEQ ID NO: 6644 - protein, 17 aa, Artificial Sequence
  Synthetically generated peptide
  VARIANT (1)..(17): Xaa = Any Amino Acid
ACEXLCAXNXPACTXGC

SEQ ID NO: 6645 - protein, 17 aa, Artificial Sequence
  Synthetically generated peptide
  VARIANT (1)..(17): Xaa = Any Amino Acid
ACEXLCAXNXPACTGXC

SEQ ID NO: 6646 - protein, 16 aa, Artificial Sequence
  Synthetically generated peptide
  VARIANT (1)..(16): Xaa = Any Amino Acid
ACEXLCAXNPXACTGC

SEQ ID NO: 6647 - protein, 17 aa, Artificial Sequence
  Synthetically generated peptide
  VARIANT (1)..(17): Xaa = Any Amino Acid
ACEXLCAXNPXXACTGC

SEQ ID NO: 6648 - protein, 17 aa, Artificial Sequence
  Synthetically generated peptide
  VARIANT (1)..(17): Xaa = Any Amino Acid
ACEXLCAXNPXAXCTGC

SEQ ID NO: 6649 - protein, 17 aa, Artificial Sequence
  Synthetically generated peptide
  VARIANT (1)..(17): Xaa = Any Amino Acid
ACEXLCAXNPXACXTGC

SEQ ID NO: 6650 - protein, 17 aa, Artificial Sequence
  Synthetically generated peptide
  VARIANT (1)..(17): Xaa = Any Amino Acid
ACEXLCAXNPXACTXGC

SEQ ID NO: 6651 - protein, 17 aa, Artificial Sequence
  Synthetically generated peptide
  VARIANT (1)..(17): Xaa = Any Amino Acid
ACEXLCAXNPXACTGXC

SEQ ID NO: 6652 - protein, 16 aa, Artificial Sequence
  Synthetically generated peptide
  VARIANT (1)..(16): Xaa = Any Amino Acid
ACEXLCAXNPAXCTGC

SEQ ID NO: 6653 - protein, 17 aa, Artificial Sequence
  Synthetically generated peptide
  VARIANT (1)..(17): Xaa = Any Amino Acid
ACEXLCAXNPAXXCTGC

SEQ ID NO: 6654 - protein, 17 aa, Artificial Sequence
  Synthetically generated peptide
  VARIANT (1)..(17): Xaa = Any Amino Acid
ACEXLCAXNPAXCXTGC

SEQ ID NO: 6655 - protein, 17 aa, Artificial Sequence
  Synthetically generated peptide
  VARIANT (1)..(17): Xaa = Any Amino Acid
ACEXLCAXNPAXCTXGC

SEQ ID NO: 6656 - protein, 17 aa, Artificial Sequence
  Synthetically generated peptide
  VARIANT (1)..(17): Xaa = Any Amino Acid
ACEXLCAXNPAXCTGXC

SEQ ID NO: 6657 - protein, 16 aa, Artificial Sequence
  Synthetically generated peptide
  VARIANT (1)..(16): Xaa = Any Amino Acid
ACEXLCAXNPACXTGC

SEQ ID NO: 6658 - protein, 17 aa, Artificial Sequence
  Synthetically generated peptide
  VARIANT (1)..(17): Xaa = Any Amino Acid
ACEXLCAXNPACXXTGC

SEQ ID NO: 6659 - protein, 17 aa, Artificial Sequence
  Synthetically generated peptide
  VARIANT (1)..(17): Xaa = Any Amino Acid
ACEXLCAXNPACXTXGC

SEQ ID NO: 6660 - protein, 17 aa, Artificial Sequence
  Synthetically generated peptide
  VARIANT (1)..(17): Xaa = Any Amino Acid
ACEXLCAXNPACXTGXC

SEQ ID NO: 6661 - protein, 16 aa, Artificial Sequence
  Synthetically generated peptide
  VARIANT (1)..(16): Xaa = Any Amino Acid
ACEXLCAXNPACTXGC

SEQ ID NO: 6662 - protein, 17 aa, Artificial Sequence
  Synthetically generated peptide
  VARIANT (1)..(17): Xaa = Any Amino Acid
ACEXLCAXNPACTXXGC

SEQ ID NO: 6663 - protein, 17 aa, Artificial Sequence
  Synthetically generated peptide
  VARIANT (1)..(17): Xaa = Any Amino Acid
ACEXLCAXNPACTXGXC

SEQ ID NO: 6664 - protein, 16 aa, Artificial Sequence
  Synthetically generated peptide
  VARIANT (1)..(16): Xaa = Any Amino Acid
ACEXLCAXNPACTGXC

SEQ ID NO: 6665 - protein, 17 aa, Artificial Sequence
  Synthetically generated peptide
  VARIANT (1)..(17): Xaa = Any Amino Acid
ACEXLCAXNPACTGXXC

SEQ ID NO: 6666 - protein, 15 aa, Artificial Sequence
  Synthetically generated peptide
  VARIANT (1)..(15): Xaa = Any Amino Acid
ACEXLCANXPACTGC

SEQ ID NO: 6667 - protein, 16 aa, Artificial Sequence
  Synthetically generated peptide
  VARIANT (1)..(16): Xaa = Any Amino Acid
ACEXLCANXXPACTGC

SEQ ID NO: 6668 - protein, 17 aa, Artificial Sequence
  Synthetically generated peptide
  VARIANT (1)..(17): Xaa = Any Amino Acid
ACEXLCANXXXPACTGC

SEQ ID NO: 6669 - protein, 17 aa, Artificial Sequence
  Synthetically generated peptide
  VARIANT (1)..(17): Xaa = Any Amino Acid
ACEXLCANXXPXACTGC

SEQ ID NO: 6670 - protein, 17 aa, Artificial Sequence
  Synthetically generated peptide
  VARIANT (1)..(17): Xaa = Any Amino Acid
ACEXLCANXXPAXCTGC

SEQ ID NO: 6671 - protein, 17 aa, Artificial Sequence
  Synthetically generated peptide
  VARIANT (1)..(17): Xaa = Any Amino Acid
ACEXLCANXXPACXTGC

SEQ ID NO: 6672 - protein, 17 aa, Artificial Sequence
  Synthetically generated peptide
  VARIANT (1)..(17): Xaa = Any Amino Acid
ACEXLCANXXPACTXGC

SEQ ID NO: 6673 - protein, 17 aa, Artificial Sequence
  Synthetically generated peptide
  VARIANT (1)..(17): Xaa = Any Amino Acid
ACEXLCANXXPACTGXC

SEQ ID NO: 6674 - protein, 16 aa, Artificial Sequence
  Synthetically generated peptide
  VARIANT (1)..(16): Xaa = Any Amino Acid
ACEXLCANXPXACTGC

SEQ ID NO: 6675 - protein, 17 aa, Artificial Sequence
  Synthetically generated peptide
  VARIANT (1)..(17): Xaa = Any Amino Acid
ACEXLCANXPXXACTGC

SEQ ID NO: 6676 - protein, 17 aa, Artificial Sequence
  Synthetically generated peptide
  VARIANT (1)..(17): Xaa = Any Amino Acid
ACEXLCANXPXAXCTGC

SEQ ID NO: 6677 - protein, 17 aa, Artificial Sequence
  Synthetically generated peptide
  VARIANT (1)..(17): Xaa = Any Amino Acid
ACEXLCANXPXACXTGC

SEQ ID NO: 6678 - protein, 17 aa, Artificial Sequence
  Synthetically generated peptide
  VARIANT (1)..(17): Xaa = Any Amino Acid
ACEXLCANXPXACTXGC

SEQ ID NO: 6679 - protein, 17 aa, Artificial Sequence
  Synthetically generated peptide
  VARIANT (1)..(17): Xaa = Any Amino Acid
ACEXLCANXPXACTGXC

SEQ ID NO: 6680 - protein, 16 aa, Artificial Sequence
  Synthetically generated peptide
  VARIANT (1)..(16): Xaa = Any Amino Acid
ACEXLCANXPAXCTGC

SEQ ID NO: 6681 - protein, 17 aa, Artificial Sequence
  Synthetically generated peptide
  VARIANT (1)..(17): Xaa = Any Amino Acid
ACEXLCANXPAXXCTGC

SEQ ID NO: 6682 - protein, 17 aa, Artificial Sequence
  Synthetically generated peptide
  VARIANT (1)..(17): Xaa = Any Amino Acid
ACEXLCANXPAXCXTGC

SEQ ID NO: 6683 - protein, 17 aa, Artificial Sequence
  Synthetically generated peptide
  VARIANT (1)..(17): Xaa = Any Amino Acid
ACEXLCANXPAXCTXGC

SEQ ID NO: 6684 - protein, 17 aa, Artificial Sequence
  Synthetically generated peptide
  VARIANT (1)..(17): Xaa = Any Amino Acid
ACEXLCANXPAXCTGXC

SEQ ID NO: 6685 - protein, 16 aa, Artificial Sequence
  Synthetically generated peptide
  VARIANT (1)..(16): Xaa = Any Amino Acid
ACEXLCANXPACXTGC

SEQ ID NO: 6686 - protein, 17 aa, Artificial Sequence
  Synthetically generated peptide
  VARIANT (1)..(17): Xaa = Any Amino Acid
ACEXLCANXPACXXTGC

SEQ ID NO: 6687 - protein, 17 aa, Artificial Sequence
  Synthetically generated peptide
  VARIANT (1)..(17): Xaa = Any Amino Acid
ACEXLCANXPACXTXGC

SEQ ID NO: 6688 - protein, 17 aa, Artificial Sequence
  Synthetically generated peptide
  VARIANT (1)..(17): Xaa = Any Amino Acid
ACEXLCANXPACXTGXC

SEQ ID NO: 6689 - protein, 16 aa, Artificial Sequence
  Synthetically generated peptide
  VARIANT (1)..(16): Xaa = Any Amino Acid
ACEXLCANXPACTXGC

SEQ ID NO: 6690 - protein, 17 aa, Artificial Sequence
  Synthetically generated peptide
  VARIANT (1)..(17): Xaa = Any Amino Acid
ACEXLCANXPACTXXGC

SEQ ID NO: 6691 - protein, 17 aa, Artificial Sequence
  Synthetically generated peptide
  VARIANT (1)..(17): Xaa = Any Amino Acid
ACEXLCANXPACTXGXC

SEQ ID NO: 6692 - protein, 16 aa, Artificial Sequence
  Synthetically generated peptide
  VARIANT (1)..(16): Xaa = Any Amino Acid
ACEXLCANXPACTGXC

SEQ ID NO: 6693 - protein, 17 aa, Artificial Sequence
  Synthetically generated peptide
  VARIANT (1)..(17): Xaa = Any Amino Acid
ACEXLCANXPACTGXXC

SEQ ID NO: 6694 - protein, 15 aa, Artificial Sequence
  Synthetically generated peptide
  VARIANT (1)..(15): Xaa = Any Amino Acid
ACEXLCANPXACTGC

SEQ ID NO: 6695 - protein, 16 aa, Artificial Sequence
  Synthetically generated peptide
  VARIANT (1)..(16): Xaa = Any Amino Acid
ACEXLCANPXXACTGC

SEQ ID NO: 6696 - protein, 17 aa, Artificial Sequence
  Synthetically generated peptide
  VARIANT (1)..(17): Xaa = Any Amino Acid
ACEXLCANPXXXACTGC

SEQ ID NO: 6697 - protein, 17 aa, Artificial Sequence
  Synthetically generated peptide
  VARIANT (1)..(17): Xaa = Any Amino Acid
ACEXLCANPXXAXCTGC

SEQ ID NO: 6698 - protein, 17 aa, Artificial Sequence
  Synthetically generated peptide
  VARIANT (1)..(17): Xaa = Any Amino Acid
ACEXLCANPXXACXTGC

SEQ ID NO: 6699 - protein, 17 aa, Artificial Sequence
  Synthetically generated peptide
  VARIANT (1)..(17): Xaa = Any Amino Acid
ACEXLCANPXXACTXGC

SEQ ID NO: 6700 - protein, 17 aa, Artificial Sequence
  Synthetically generated peptide
  VARIANT (1)..(17): Xaa = Any Amino Acid
ACEXLCANPXXACTGXC

SEQ ID NO: 6701 - protein, 16 aa, Artificial Sequence
  Synthetically generated peptide
  VARIANT (1)..(16): Xaa = Any Amino Acid
ACEXLCANPXAXCTGC

SEQ ID NO: 6702 - protein, 17 aa, Artificial Sequence
  Synthetically generated peptide
  VARIANT (1)..(17): Xaa = Any Amino Acid
ACEXLCANPXAXXCTGC

SEQ ID NO: 6703 - protein, 17 aa, Artificial Sequence
  Synthetically generated peptide
  VARIANT (1)..(17): Xaa = Any Amino Acid
ACEXLCANPXAXCXTGC

SEQ ID NO: 6704 - protein, 17 aa, Artificial Sequence
  Synthetically generated peptide
  VARIANT (1)..(17): Xaa = Any Amino Acid
ACEXLCANPXAXCTXGC

SEQ ID NO: 6705 - protein, 17 aa, Artificial Sequence
  Synthetically generated peptide
  VARIANT (1)..(17): Xaa = Any Amino Acid
ACEXLCANPXAXCTGXC

SEQ ID NO: 6706 - protein, 16 aa, Artificial Sequence
  Synthetically generated peptide
  VARIANT (1)..(16): Xaa = Any Amino Acid
ACEXLCANPXACXTGC

SEQ ID NO: 6707 - protein, 17 aa, Artificial Sequence
  Synthetically generated peptide
  VARIANT (1)..(17): Xaa = Any Amino Acid
ACEXLCANPXACXXTGC

SEQ ID NO: 6708 - protein, 17 aa, Artificial Sequence
  Synthetically generated peptide
  VARIANT (1)..(17): Xaa = Any Amino Acid
ACEXLCANPXACXTXGC

SEQ ID NO: 6709 - protein, 17 aa, Artificial Sequence
  Synthetically generated peptide
  VARIANT (1)..(17): Xaa = Any Amino Acid
ACEXLCANPXACXTGXC

SEQ ID NO: 6710 - protein, 16 aa, Artificial Sequence
  Synthetically generated peptide
  VARIANT (1)..(16): Xaa = Any Amino Acid
ACEXLCANPXACTXGC

SEQ ID NO: 6711 - protein, 17 aa, Artificial Sequence
  Synthetically generated peptide
  VARIANT (1)..(17): Xaa = Any Amino Acid
ACEXLCANPXACTXXGC

SEQ ID NO: 6712 - protein, 17 aa, Artificial Sequence
  Synthetically generated peptide
  VARIANT (1)..(17): Xaa = Any Amino Acid
ACEXLCANPXACTXGXC

SEQ ID NO: 6713 - protein, 16 aa, Artificial Sequence
  Synthetically generated peptide
  VARIANT (1)..(16): Xaa = Any Amino Acid
ACEXLCANPXACTGXC

SEQ ID NO: 6714 - protein, 17 aa, Artificial Sequence
  Synthetically generated peptide
  VARIANT (1)..(17): Xaa = Any Amino Acid
ACEXLCANPXACTGXXC

SEQ ID NO: 6715 - protein, 15 aa, Artificial Sequence
  Synthetically generated peptide
  VARIANT (1)..(15): Xaa = Any Amino Acid
ACEXLCANPAXCTGC

SEQ ID NO: 6716 - protein, 16 aa, Artificial Sequence
  Synthetically generated peptide
  VARIANT (1)..(16): Xaa = Any Amino Acid
ACEXLCANPAXXCTGC

SEQ ID NO: 6717 - protein, 17 aa, Artificial Sequence
  Synthetically generated peptide
  VARIANT (1)..(17): Xaa = Any Amino Acid
ACEXLCANPAXXXCTGC

SEQ ID NO: 6718 - protein, 17 aa, Artificial Sequence
  Synthetically generated peptide
  VARIANT (1)..(17): Xaa = Any Amino Acid
ACEXLCANPAXXCXTGC

SEQ ID NO: 6719 - protein, 17 aa, Artificial Sequence
  Synthetically generated peptide
  VARIANT (1)..(17): Xaa = Any Amino Acid
ACEXLCANPAXXCTXGC

SEQ ID NO: 6720 - protein, 17 aa, Artificial Sequence
  Synthetically generated peptide
  VARIANT (1)..(17): Xaa = Any Amino Acid
ACEXLCANPAXXCTGXC

SEQ ID NO: 6721 - protein, 16 aa, Artificial Sequence
  Synthetically generated peptide
  VARIANT (1)..(16): Xaa = Any Amino Acid
ACEXLCANPAXCXTGC

SEQ ID NO: 6722 - protein, 17 aa, Artificial Sequence
  Synthetically generated peptide
  VARIANT (1)..(17): Xaa = Any Amino Acid
ACEXLCANPAXCXXTGC

SEQ ID NO: 6723 - protein, 17 aa, Artificial Sequence
  Synthetically generated peptide
  VARIANT (1)..(17): Xaa = Any Amino Acid
ACEXLCANPAXCXTXGC

SEQ ID NO: 6724 - protein, 17 aa, Artificial Sequence
  Synthetically generated peptide
  VARIANT (1)..(17): Xaa = Any Amino Acid
ACEXLCANPAXCXTGXC

SEQ ID NO: 6725 - protein, 16 aa, Artificial Sequence
  Synthetically generated peptide
  VARIANT (1)..(16): Xaa = Any Amino Acid
ACEXLCANPAXCTXGC

SEQ ID NO: 6726 - protein, 17 aa, Artificial Sequence
  Synthetically generated peptide
  VARIANT (1)..(17): Xaa = Any Amino Acid
ACEXLCANPAXCTXXGC

SEQ ID NO: 6727 - protein, 17 aa, Artificial Sequence
  Synthetically generated peptide
  VARIANT (1)..(17): Xaa = Any Amino Acid
ACEXLCANPAXCTXGXC

SEQ ID NO: 6728 - protein, 16 aa, Artificial Sequence
  Synthetically generated peptide
  VARIANT (1)..(16): Xaa = Any Amino Acid
ACEXLCANPAXCTGXC

SEQ ID NO: 6729 - protein, 17 aa, Artificial Sequence
  Synthetically generated peptide
  VARIANT (1)..(17): Xaa = Any Amino Acid
ACEXLCANPAXCTGXXC

SEQ ID NO: 6730 - protein, 15 aa, Artificial Sequence
  Synthetically generated peptide
  VARIANT (1)..(15): Xaa = Any Amino Acid
ACEXLCANPACXTGC

SEQ ID NO: 6731 - protein, 16 aa, Artificial Sequence
  Synthetically generated peptide
  VARIANT (1)..(16): Xaa = Any Amino Acid
ACEXLCANPACXXTGC

SEQ ID NO: 6732 - protein, 17 aa, Artificial Sequence
  Synthetically generated peptide
  VARIANT (1)..(17): Xaa = Any Amino Acid
ACEXLCANPACXXXTGC

SEQ ID NO: 6733 - protein, 17 aa, Artificial Sequence
  Synthetically generated peptide
  VARIANT (1)..(17): Xaa = Any Amino Acid
ACEXLCANPACXXTXGC

SEQ ID NO: 6734 - protein, 17 aa, Artificial Sequence
  Synthetically generated peptide
  VARIANT (1)..(17): Xaa = Any Amino Acid
ACEXLCANPACXXTGXC

SEQ ID NO: 6735 - protein, 16 aa, Artificial Sequence
  Synthetically generated peptide
  VARIANT (1)..(16): Xaa = Any Amino Acid
ACEXLCANPACXTXGC

SEQ ID NO: 6736 - protein, 17 aa, Artificial Sequence
  Synthetically generated peptide
  VARIANT (1)..(17): Xaa = Any Amino Acid
ACEXLCANPACXTXXGC

SEQ ID NO: 6737 - protein, 17 aa, Artificial Sequence
  Synthetically generated peptide
  VARIANT (1)..(17): Xaa = Any Amino Acid
ACEXLCANPACXTXGXC

SEQ ID NO: 6738 - protein, 16 aa, Artificial Sequence
  Synthetically generated peptide
  VARIANT (1)..(16): Xaa = Any Amino Acid
ACEXLCANPACXTGXC

SEQ ID NO: 6739 - protein, 17 aa, Artificial Sequence
  Synthetically generated peptide
  VARIANT (1)..(17): Xaa = Any Amino Acid
ACEXLCANPACXTGXXC

SEQ ID NO: 6740 - protein, 15 aa, Artificial Sequence
  Synthetically generated peptide
  VARIANT (1)..(15): Xaa = Any Amino Acid
ACEXLCANPACTXGC

SEQ ID NO: 6741 - protein, 16 aa, Artificial Sequence
  Synthetically generated peptide
  VARIANT (1)..(16): Xaa = Any Amino Acid
ACEXLCANPACTXXGC

SEQ ID NO: 6742 - protein, 17 aa, Artificial Sequence
  Synthetically generated peptide
  VARIANT (1)..(17): Xaa = Any Amino Acid
ACEXLCANPACTXXXGC

SEQ ID NO: 6743 - protein, 17 aa, Artificial Sequence
  Synthetically generated peptide
  VARIANT (1)..(17): Xaa = Any Amino Acid
ACEXLCANPACTXXGXC

SEQ ID NO: 6744 - protein, 16 aa, Artificial Sequence
  Synthetically generated peptide
  VARIANT (1)..(16): Xaa = Any Amino Acid
ACEXLCANPACTXGXC

SEQ ID NO: 6745 - protein, 17 aa, Artificial Sequence
  Synthetically generated peptide
  VARIANT (1)..(17): Xaa = Any Amino Acid
ACEXLCANPACTXGXXC

SEQ ID NO: 6746 - protein, 15 aa, Artificial Sequence
  Synthetically generated peptide
  VARIANT (1)..(15): Xaa = Any Amino Acid
ACEXLCANPACTGXC

SEQ ID NO: 6747 - protein, 16 aa, Artificial Sequence
  Synthetically generated peptide
  VARIANT (1)..(16): Xaa = Any Amino Acid
ACEXLCANPACTGXXC

SEQ ID NO: 6748 - protein, 17 aa, Artificial Sequence
  Synthetically generated peptide
  VARIANT (1)..(17): Xaa = Any Amino Acid
ACEXLCANPACTGXXXC

SEQ ID NO: 6749 - protein, 14 aa, Artificial Sequence
  Synthetically generated peptide
  VARIANT (1)..(14): Xaa = Any Amino Acid
ACELXCANPACTGC

SEQ ID NO: 6750 - protein, 15 aa, Artificial Sequence
  Synthetically generated peptide
  VARIANT (1)..(15): Xaa = Any Amino Acid
ACELXXCANPACTGC

SEQ ID NO: 6751 - protein, 16 aa, Artificial Sequence
  Synthetically generated peptide
  VARIANT (1)..(16): Xaa = Any Amino Acid
ACELXXXCANPACTGC

SEQ ID NO: 6752 - protein, 17 aa, Artificial Sequence
  Synthetically generated peptide
  VARIANT (1)..(17): Xaa = Any Amino Acid
ACELXXXXCANPACTGC

SEQ ID NO: 6753 - protein, 17 aa, Artificial Sequence
  Synthetically generated peptide
  VARIANT (1)..(17): Xaa = Any Amino Acid
ACELXXXCAXNPACTGC

SEQ ID NO: 6754 - protein, 17 aa, Artificial Sequence
  Synthetically generated peptide
  VARIANT (1)..(17): Xaa = Any Amino Acid
ACELXXXCANXPACTGC

SEQ ID NO: 6755 - protein, 17 aa, Artificial Sequence
  Synthetically generated peptide
  VARIANT (1)..(17): Xaa = Any Amino Acid
ACELXXXCANPXACTGC

SEQ ID NO: 6756 - protein, 17 aa, Artificial Sequence
  Synthetically generated peptide
  VARIANT (1)..(17): Xaa = Any Amino Acid
ACELXXXCANPAXCTGC

SEQ ID NO: 6757 - protein, 17 aa, Artificial Sequence
  Synthetically generated peptide
  VARIANT (1)..(17): Xaa = Any Amino Acid
ACELXXXCANPACXTGC

SEQ ID NO: 6758 - protein, 17 aa, Artificial Sequence
  Synthetically generated peptide
  VARIANT (1)..(17): Xaa = Any Amino Acid
ACELXXXCANPACTXGC

SEQ ID NO: 6759 - protein, 17 aa, Artificial Sequence
  Synthetically generated peptide
  VARIANT (1)..(17): Xaa = Any Amino Acid
ACELXXXCANPACTGXC

SEQ ID NO: 6760 - protein, 16 aa, Artificial Sequence
  Synthetically generated peptide
  VARIANT (1)..(16): Xaa = Any Amino Acid
ACELXXCAXNPACTGC

SEQ ID NO: 6761 - protein, 17 aa, Artificial Sequence
  Synthetically generated peptide
  VARIANT (1)..(17): Xaa = Any Amino Acid
ACELXXCAXXNPACTGC

SEQ ID NO: 6762 - protein, 17 aa, Artificial Sequence
  Synthetically generated peptide
  VARIANT (1)..(17): Xaa = Any Amino Acid
ACELXXCAXNXPACTGC

SEQ ID NO: 6763 - protein, 17 aa, Artificial Sequence
  Synthetically generated peptide
  VARIANT (1)..(17): Xaa = Any Amino Acid
ACELXXCAXNPXACTGC

SEQ ID NO: 6764 - protein, 17 aa, Artificial Sequence
  Synthetically generated peptide
  VARIANT (1)..(17): Xaa = Any Amino Acid
ACELXXCAXNPAXCTGC

SEQ ID NO: 6765 - protein, 17 aa, Artificial Sequence
  Synthetically generated peptide
  VARIANT (1)..(17): Xaa = Any Amino Acid
ACELXXCAXNPACXTGC

SEQ ID NO: 6766 - protein, 17 aa, Artificial Sequence
  Synthetically generated peptide
  VARIANT (1)..(17): Xaa = Any Amino Acid
ACELXXCAXNPACTXGC

SEQ ID NO: 6767 - protein, 17 aa, Artificial Sequence
  Synthetically generated peptide
  VARIANT (1)..(17): Xaa = Any Amino Acid
ACELXXCAXNPACTGXC

SEQ ID NO: 6768 - protein, 16 aa, Artificial Sequence
  Synthetically generated peptide
  VARIANT (1)..(16): Xaa = Any Amino Acid
ACELXXCANXPACTGC

SEQ ID NO: 6769 - protein, 17 aa, Artificial Sequence
  Synthetically generated peptide
  VARIANT (1)..(17): Xaa = Any Amino Acid
ACELXXCANXXPACTGC

SEQ ID NO: 6770 - protein, 17 aa, Artificial Sequence
  Synthetically generated peptide
  VARIANT (1)..(17): Xaa = Any Amino Acid
ACELXXCANXPXACTGC

SEQ ID NO: 6771 - protein, 17 aa, Artificial Sequence
  Synthetically generated peptide
  VARIANT (1)..(17): Xaa = Any Amino Acid
ACELXXCANXPAXCTGC

SEQ ID NO: 6772 - protein, 17 aa, Artificial Sequence
  Synthetically generated peptide
  VARIANT (1)..(17): Xaa = Any Amino Acid
ACELXXCANXPACXTGC

SEQ ID NO: 6773 - protein, 17 aa, Artificial Sequence
  Synthetically generated peptide
  VARIANT (1)..(17): Xaa = Any Amino Acid
ACELXXCANXPACTXGC

SEQ ID NO: 6774 - protein, 17 aa, Artificial Sequence
  Synthetically generated peptide
  VARIANT (1)..(17): Xaa = Any Amino Acid
ACELXXCANXPACTGXC

SEQ ID NO: 6775 - protein, 16 aa, Artificial Sequence
  Synthetically generated peptide
  VARIANT (1)..(16): Xaa = Any Amino Acid
ACELXXCANPXACTGC

SEQ ID NO: 6776 - protein, 17 aa, Artificial Sequence
  Synthetically generated peptide
  VARIANT (1)..(17): Xaa = Any Amino Acid
ACELXXCANPXXACTGC

SEQ ID NO: 6777 - protein, 17 aa, Artificial Sequence
  Synthetically generated peptide
  VARIANT (1)..(17): Xaa = Any Amino Acid
ACELXXCANPXAXCTGC

SEQ ID NO: 6778 - protein, 17 aa, Artificial Sequence
  Synthetically generated peptide
  VARIANT (1)..(17): Xaa = Any Amino Acid
ACELXXCANPXACXTGC

SEQ ID NO: 6779 - protein, 17 aa, Artificial Sequence
  Synthetically generated peptide
  VARIANT (1)..(17): Xaa = Any Amino Acid
ACELXXCANPXACTXGC

SEQ ID NO: 6780 - protein, 17 aa, Artificial Sequence
  Synthetically generated peptide
  VARIANT (1)..(17): Xaa = Any Amino Acid
ACELXXCANPXACTGXC

SEQ ID NO: 6781 - protein, 16 aa, Artificial Sequence
  Synthetically generated peptide
  VARIANT (1)..(16): Xaa = Any Amino Acid
ACELXXCANPAXCTGC

SEQ ID NO: 6782 - protein, 17 aa, Artificial Sequence
  Synthetically generated peptide
  VARIANT (1)..(17): Xaa = Any Amino Acid
ACELXXCANPAXXCTGC

SEQ ID NO: 6783 - protein, 17 aa, Artificial Sequence
  Synthetically generated peptide
  VARIANT (1)..(17): Xaa = Any Amino Acid
ACELXXCANPAXCXTGC

SEQ ID NO: 6784 - protein, 17 aa, Artificial Sequence
  Synthetically generated peptide
  VARIANT (1)..(17): Xaa = Any Amino Acid
ACELXXCANPAXCTXGC

SEQ ID NO: 6785 - protein, 17 aa, Artificial Sequence
  Synthetically generated peptide
  VARIANT (1)..(17): Xaa = Any Amino Acid
ACELXXCANPAXCTGXC

SEQ ID NO: 6786 - protein, 16 aa, Artificial Sequence
  Synthetically generated peptide
  VARIANT (1)..(16): Xaa = Any Amino Acid
ACELXXCANPACXTGC

SEQ ID NO: 6787 - protein, 17 aa, Artificial Sequence
  Synthetically generated peptide
  VARIANT (1)..(17): Xaa = Any Amino Acid
ACELXXCANPACXXTGC

SEQ ID NO: 6788 - protein, 17 aa, Artificial Sequence
  Synthetically generated peptide
  VARIANT (1)..(17): Xaa = Any Amino Acid
ACELXXCANPACXTXGC

SEQ ID NO: 6789 - protein, 17 aa, Artificial Sequence
  Synthetically generated peptide
  VARIANT (1)..(17): Xaa = Any Amino Acid
ACELXXCANPACXTGXC

SEQ ID NO: 6790 - protein, 16 aa, Artificial Sequence
  Synthetically generated peptide
  VARIANT (1)..(16): Xaa = Any Amino Acid
ACELXXCANPACTXGC

SEQ ID NO: 6791 - protein, 17 aa, Artificial Sequence
  Synthetically generated peptide
  VARIANT (1)..(17): Xaa = Any Amino Acid
ACELXXCANPACTXXGC

SEQ ID NO: 6792 - protein, 17 aa, Artificial Sequence
  Synthetically generated peptide
  VARIANT (1)..(17): Xaa = Any Amino Acid
ACELXXCANPACTXGXC

SEQ ID NO: 6793 - protein, 16 aa, Artificial Sequence
  Synthetically generated peptide
  VARIANT (1)..(16): Xaa = Any Amino Acid
ACELXXCANPACTGXC

SEQ ID NO: 6794 - protein, 17 aa, Artificial Sequence
  Synthetically generated peptide
  VARIANT (1)..(17): Xaa = Any Amino Acid
ACELXXCANPACTGXXC

SEQ ID NO: 6795 - protein, 15 aa, Artificial Sequence
  Synthetically generated peptide
  VARIANT (1)..(15): Xaa = Any Amino Acid
ACELXCAXNPACTGC

SEQ ID NO: 6796 - protein, 16 aa, Artificial Sequence
  Synthetically generated peptide
  VARIANT (1)..(16): Xaa = Any Amino Acid
ACELXCAXXNPACTGC

SEQ ID NO: 6797 - protein, 17 aa, Artificial Sequence
  Synthetically generated peptide
  VARIANT (1)..(17): Xaa = Any Amino Acid
ACELXCAXXXNPACTGC

SEQ ID NO: 6798 - protein, 17 aa, Artificial Sequence
  Synthetically generated peptide
  VARIANT (1)..(17): Xaa = Any Amino Acid
ACELXCAXXNXPACTGC

SEQ ID NO: 6799 - protein, 17 aa, Artificial Sequence
  Synthetically generated peptide
  VARIANT (1)..(17): Xaa = Any Amino Acid
ACELXCAXXNPXACTGC

SEQ ID NO: 6800 - protein, 17 aa, Artificial Sequence
  Synthetically generated peptide
  VARIANT (1)..(17): Xaa = Any Amino Acid
ACELXCAXXNPAXCTGC

SEQ ID NO: 6801 - protein, 17 aa, Artificial Sequence
  Synthetically generated peptide
  VARIANT (1)..(17): Xaa = Any Amino Acid
ACELXCAXXNPACXTGC

SEQ ID NO: 6802 - protein, 17 aa, Artificial Sequence
  Synthetically generated peptide
  VARIANT (1)..(17): Xaa = Any Amino Acid
ACELXCAXXNPACTXGC

SEQ ID NO: 6803 - protein, 17 aa, Artificial Sequence
  Synthetically generated peptide
  VARIANT (1)..(17): Xaa = Any Amino Acid
ACELXCAXXNPACTGXC

SEQ ID NO: 6804 - protein, 16 aa, Artificial Sequence
  Synthetically generated peptide
  VARIANT (1)..(16): Xaa = Any Amino Acid
ACELXCAXNXPACTGC

SEQ ID NO: 6805 - protein, 17 aa, Artificial Sequence
  Synthetically generated peptide
  VARIANT (1)..(17): Xaa = Any Amino Acid
ACELXCAXNXXPACTGC

SEQ ID NO: 6806 - protein, 17 aa, Artificial Sequence
  Synthetically generated peptide
  VARIANT (1)..(17): Xaa = Any Amino Acid
ACELXCAXNXPXACTGC

SEQ ID NO: 6807 - protein, 17 aa, Artificial Sequence
  Synthetically generated peptide
  VARIANT (1)..(17): Xaa = Any Amino Acid
ACELXCAXNXPAXCTGC

SEQ ID NO: 6808 - protein, 17 aa, Artificial Sequence
  Synthetically generated peptide
  VARIANT (1)..(17): Xaa = Any Amino Acid
ACELXCAXNXPACXTGC

SEQ ID NO: 6809 - protein, 17 aa, Artificial Sequence
  Synthetically generated peptide
  VARIANT (1)..(17): Xaa = Any Amino Acid
ACELXCAXNXPACTXGC

SEQ ID NO: 6810 - protein, 17 aa, Artificial Sequence
  Synthetically generated peptide
  VARIANT (1)..(17): Xaa = Any Amino Acid
ACELXCAXNXPACTGXC

SEQ ID NO: 6811 - protein, 16 aa, Artificial Sequence
  Synthetically generated peptide
  VARIANT (1)..(16): Xaa = Any Amino Acid
ACELXCAXNPXACTGC

SEQ ID NO: 6812 - protein, 17 aa, Artificial Sequence
  Synthetically generated peptide
  VARIANT (1)..(17): Xaa = Any Amino Acid
ACELXCAXNPXXACTGC

SEQ ID NO: 6813 - protein, 17 aa, Artificial Sequence
  Synthetically generated peptide
  VARIANT (1)..(17): Xaa = Any Amino Acid
ACELXCAXNPXAXCTGC

SEQ ID NO: 6814 - protein, 17 aa, Artificial Sequence
  Synthetically generated peptide
  VARIANT (1)..(17): Xaa = Any Amino Acid
ACELXCAXNPXACXTGC

SEQ ID NO: 6815 - protein, 17 aa, Artificial Sequence
  Synthetically generated peptide
  VARIANT (1)..(17): Xaa = Any Amino Acid
ACELXCAXNPXACTXGC

SEQ ID NO: 6816 - protein, 17 aa, Artificial Sequence
  Synthetically generated peptide
  VARIANT (1)..(17): Xaa = Any Amino Acid
ACELXCAXNPXACTGXC

SEQ ID NO: 6817 - protein, 16 aa, Artificial Sequence
  Synthetically generated peptide
  VARIANT (1)..(16): Xaa = Any Amino Acid
ACELXCAXNPAXCTGC

SEQ ID NO: 6818 - protein, 17 aa, Artificial Sequence
  Synthetically generated peptide
  VARIANT (1)..(17): Xaa = Any Amino Acid
ACELXCAXNPAXXCTGC

SEQ ID NO: 6819 - protein, 17 aa, Artificial Sequence
  Synthetically generated peptide
  VARIANT (1)..(17): Xaa = Any Amino Acid
ACELXCAXNPAXCXTGC

SEQ ID NO: 6820 - protein, 17 aa, Artificial Sequence
  Synthetically generated peptide
  VARIANT (1)..(17): Xaa = Any Amino Acid
ACELXCAXNPAXCTXGC

SEQ ID NO: 6821 - protein, 17 aa, Artificial Sequence
  Synthetically generated peptide
  VARIANT (1)..(17): Xaa = Any Amino Acid
ACELXCAXNPAXCTGXC

SEQ ID NO: 6822 - protein, 16 aa, Artificial Sequence
  Synthetically generated peptide
  VARIANT (1)..(16): Xaa = Any Amino Acid
ACELXCAXNPACXTGC

SEQ ID NO: 6823 - protein, 17 aa, Artificial Sequence
  Synthetically generated peptide
  VARIANT (1)..(17): Xaa = Any Amino Acid
ACELXCAXNPACXXTGC

SEQ ID NO: 6824 - protein, 17 aa, Artificial Sequence
  Synthetically generated peptide
  VARIANT (1)..(17): Xaa = Any Amino Acid
ACELXCAXNPACXTXGC

SEQ ID NO: 6825 - protein, 17 aa, Artificial Sequence
  Synthetically generated peptide
  VARIANT (1)..(17): Xaa = Any Amino Acid
ACELXCAXNPACXTGXC

SEQ ID NO: 6826 - protein, 16 aa, Artificial Sequence
  Synthetically generated peptide
  VARIANT (1)..(16): Xaa = Any Amino Acid
ACELXCAXNPACTXGC

SEQ ID NO: 6827 - protein, 17 aa, Artificial Sequence
  Synthetically generated peptide
  VARIANT (1)..(17): Xaa = Any Amino Acid
ACELXCAXNPACTXXGC

SEQ ID NO: 6828 - protein, 17 aa, Artificial Sequence
  Synthetically generated peptide
  VARIANT (1)..(17): Xaa = Any Amino Acid
ACELXCAXNPACTXGXC

SEQ ID NO: 6829 - protein, 16 aa, Artificial Sequence
  Synthetically generated peptide
  VARIANT (1)..(16): Xaa = Any Amino Acid
ACELXCAXNPACTGXC

SEQ ID NO: 6830 - protein, 17 aa, Artificial Sequence
  Synthetically generated peptide
  VARIANT (1)..(17): Xaa = Any Amino Acid
ACELXCAXNPACTGXXC

SEQ ID NO: 6831 - protein, 15 aa, Artificial Sequence
  Synthetically generated peptide
  VARIANT (1)..(15): Xaa = Any Amino Acid
ACELXCANXPACTGC

SEQ ID NO: 6832 - protein, 16 aa, Artificial Sequence
  Synthetically generated peptide
  VARIANT (1)..(16): Xaa = Any Amino Acid
ACELXCANXXPACTGC

SEQ ID NO: 6833 - protein, 17 aa, Artificial Sequence
  Synthetically generated peptide
  VARIANT (1)..(17): Xaa = Any Amino Acid
ACELXCANXXXPACTGC

SEQ ID NO: 6834 - protein, 17 aa, Artificial Sequence
  Synthetically generated peptide
  VARIANT (1)..(17): Xaa = Any Amino Acid
ACELXCANXXPXACTGC

SEQ ID NO: 6835 - protein, 17 aa, Artificial Sequence
  Synthetically generated peptide
  VARIANT (1)..(17): Xaa = Any Amino Acid
ACELXCANXXPAXCTGC

SEQ ID NO: 6836 - protein, 17 aa, Artificial Sequence
  Synthetically generated peptide
  VARIANT (1)..(17): Xaa = Any Amino Acid
ACELXCANXXPACXTGC

SEQ ID NO: 6837 - protein, 17 aa, Artificial Sequence
  Synthetically generated peptide
  VARIANT (1)..(17): Xaa = Any Amino Acid
ACELXCANXXPACTXGC

SEQ ID NO: 6838 - protein, 17 aa, Artificial Sequence
  Synthetically generated peptide
  VARIANT (1)..(17): Xaa = Any Amino Acid
ACELXCANXXPACTGXC

SEQ ID NO: 6839 - protein, 16 aa, Artificial Sequence
  Synthetically generated peptide
  VARIANT (1)..(16): Xaa = Any Amino Acid
ACELXCANXPXACTGC

SEQ ID NO: 6840 - protein, 17 aa, Artificial Sequence
  Synthetically generated peptide
  VARIANT (1)..(17): Xaa = Any Amino Acid
ACELXCANXPXXACTGC

SEQ ID NO: 6841 - protein, 17 aa, Artificial Sequence
  Synthetically generated peptide
  VARIANT (1)..(17): Xaa = Any Amino Acid
ACELXCANXPXAXCTGC

SEQ ID NO: 6842 - protein, 17 aa, Artificial Sequence
  Synthetically generated peptide
  VARIANT (1)..(17): Xaa = Any Amino Acid
ACELXCANXPXACXTGC

SEQ ID NO: 6843 - protein, 17 aa, Artificial Sequence
  Synthetically generated peptide
  VARIANT (1)..(17): Xaa = Any Amino Acid
ACELXCANXPXACTXGC

SEQ ID NO: 6844 - protein, 17 aa, Artificial Sequence
  Synthetically generated peptide
  VARIANT (1)..(17): Xaa = Any Amino Acid
ACELXCANXPXACTGXC

SEQ ID NO: 6845 - protein, 16 aa, Artificial Sequence
  Synthetically generated peptide
  VARIANT (1)..(16): Xaa = Any Amino Acid
ACELXCANXPAXCTGC

SEQ ID NO: 6846 - protein, 17 aa, Artificial Sequence
  Synthetically generated peptide
  VARIANT (1)..(17): Xaa = Any Amino Acid
ACELXCANXPAXXCTGC

SEQ ID NO: 6847 - protein, 17 aa, Artificial Sequence
  Synthetically generated peptide
  VARIANT (1)..(17): Xaa = Any Amino Acid
ACELXCANXPAXCXTGC

SEQ ID NO: 6848 - protein, 17 aa, Artificial Sequence
  Synthetically generated peptide
  VARIANT (1)..(17): Xaa = Any Amino Acid
ACELXCANXPAXCTXGC

SEQ ID NO: 6849 - protein, 17 aa, Artificial Sequence
  Synthetically generated peptide
  VARIANT (1)..(17): Xaa = Any Amino Acid
ACELXCANXPAXCTGXC

SEQ ID NO: 6850 - protein, 16 aa, Artificial Sequence
  Synthetically generated peptide
  VARIANT (1)..(16): Xaa = Any Amino Acid
ACELXCANXPACXTGC

SEQ ID NO: 6851 - protein, 17 aa, Artificial Sequence
  Synthetically generated peptide
  VARIANT (1)..(17): Xaa = Any Amino Acid
ACELXCANXPACXXTGC

SEQ ID NO: 6852 - protein, 17 aa, Artificial Sequence
  Synthetically generated peptide
  VARIANT (1)..(17): Xaa = Any Amino Acid
ACELXCANXPACXTXGC

SEQ ID NO: 6853 - protein, 17 aa, Artificial Sequence
  Synthetically generated peptide
  VARIANT (1)..(17): Xaa = Any Amino Acid
ACELXCANXPACXTGXC

SEQ ID NO: 6854 - protein, 16 aa, Artificial Sequence
  Synthetically generated peptide
  VARIANT (1)..(16): Xaa = Any Amino Acid
ACELXCANXPACTXGC

SEQ ID NO: 6855 - protein, 17 aa, Artificial Sequence
  Synthetically generated peptide
  VARIANT (1)..(17): Xaa = Any Amino Acid
ACELXCANXPACTXXGC

SEQ ID NO: 6856 - protein, 17 aa, Artificial Sequence
  Synthetically generated peptide
  VARIANT (1)..(17): Xaa = Any Amino Acid
ACELXCANXPACTXGXC

SEQ ID NO: 6857 - protein, 16 aa, Artificial Sequence
  Synthetically generated peptide
  VARIANT (1)..(16): Xaa = Any Amino Acid
ACELXCANXPACTGXC

SEQ ID NO: 6858 - protein, 17 aa, Artificial Sequence
  Synthetically generated peptide
  VARIANT (1)..(17): Xaa = Any Amino Acid
ACELXCANXPACTGXXC

SEQ ID NO: 6859 - protein, 15 aa, Artificial Sequence
  Synthetically generated peptide
  VARIANT (1)..(15): Xaa = Any Amino Acid
ACELXCANPXACTGC

SEQ ID NO: 6860 - protein, 16 aa, Artificial Sequence
  Synthetically generated peptide
  VARIANT (1)..(16): Xaa = Any Amino Acid
ACELXCANPXXACTGC

SEQ ID NO: 6861 - protein, 17 aa, Artificial Sequence
  Synthetically generated peptide
  VARIANT (1)..(17): Xaa = Any Amino Acid
ACELXCANPXXXACTGC

SEQ ID NO: 6862 - protein, 17 aa, Artificial Sequence
  Synthetically generated peptide
  VARIANT (1)..(17): Xaa = Any Amino Acid
ACELXCANPXXAXCTGC

SEQ ID NO: 6863 - protein, 17 aa, Artificial Sequence
  Synthetically generated peptide
  VARIANT (1)..(17): Xaa = Any Amino Acid
ACELXCANPXXACXTGC

SEQ ID NO: 6864 - protein, 17 aa, Artificial Sequence
  Synthetically generated peptide
  VARIANT (1)..(17): Xaa = Any Amino Acid
ACELXCANPXXACTXGC

SEQ ID NO: 6865 - protein, 17 aa, Artificial Sequence
  Synthetically generated peptide
  VARIANT (1)..(17): Xaa = Any Amino Acid
ACELXCANPXXACTGXC

SEQ ID NO: 6866 - protein, 16 aa, Artificial Sequence
  Synthetically generated peptide
  VARIANT (1)..(16): Xaa = Any Amino Acid
ACELXCANPXAXCTGC

SEQ ID NO: 6867 - protein, 17 aa, Artificial Sequence
  Synthetically generated peptide
  VARIANT (1)..(17): Xaa = Any Amino Acid
ACELXCANPXAXXCTGC

SEQ ID NO: 6868 - protein, 17 aa, Artificial Sequence
  Synthetically generated peptide
  VARIANT (1)..(17): Xaa = Any Amino Acid
ACELXCANPXAXCXTGC

SEQ ID NO: 6869 - protein, 17 aa, Artificial Sequence
  Synthetically generated peptide
  VARIANT (1)..(17): Xaa = Any Amino Acid
ACELXCANPXAXCTXGC

SEQ ID NO: 6870 - protein, 17 aa, Artificial Sequence
  Synthetically generated peptide
  VARIANT (1)..(17): Xaa = Any Amino Acid
ACELXCANPXAXCTGXC

SEQ ID NO: 6871 - protein, 16 aa, Artificial Sequence
  Synthetically generated peptide
  VARIANT (1)..(16): Xaa = Any Amino Acid
ACELXCANPXACXTGC

SEQ ID NO: 6872 - protein, 17 aa, Artificial Sequence
  Synthetically generated peptide
  VARIANT (1)..(17): Xaa = Any Amino Acid
ACELXCANPXACXXTGC

SEQ ID NO: 6873 - protein, 17 aa, Artificial Sequence
  Synthetically generated peptide
  VARIANT (1)..(17): Xaa = Any Amino Acid
ACELXCANPXACXTXGC

SEQ ID NO: 6874 - protein, 17 aa, Artificial Sequence
  Synthetically generated peptide
  VARIANT (1)..(17): Xaa = Any Amino Acid
ACELXCANPXACXTGXC

SEQ ID NO: 6875 - protein, 16 aa, Artificial Sequence
  Synthetically generated peptide
  VARIANT (1)..(16): Xaa = Any Amino Acid
ACELXCANPXACTXGC

SEQ ID NO: 6876 - protein, 17 aa, Artificial Sequence
  Synthetically generated peptide
  VARIANT (1)..(17): Xaa = Any Amino Acid
ACELXCANPXACTXXGC

SEQ ID NO: 6877 - protein, 17 aa, Artificial Sequence
  Synthetically generated peptide
  VARIANT (1)..(17): Xaa = Any Amino Acid
ACELXCANPXACTXGXC

SEQ ID NO: 6878 - protein, 16 aa, Artificial Sequence
  Synthetically generated peptide
  VARIANT (1)..(16): Xaa = Any Amino Acid
ACELXCANPXACTGXC

SEQ ID NO: 6879 - protein, 17 aa, Artificial Sequence
  Synthetically generated peptide
  VARIANT (1)..(17): Xaa = Any Amino Acid
ACELXCANPXACTGXXC

SEQ ID NO: 6880 - protein, 15 aa, Artificial Sequence
  Synthetically generated peptide
  VARIANT (1)..(15): Xaa = Any Amino Acid
ACELXCANPAXCTGC

SEQ ID NO: 6881 - protein, 16 aa, Artificial Sequence
  Synthetically generated peptide
  VARIANT (1)..(16): Xaa = Any Amino Acid
ACELXCANPAXXCTGC

SEQ ID NO: 6882 - protein, 17 aa, Artificial Sequence
  Synthetically generated peptide
  VARIANT (1)..(17): Xaa = Any Amino Acid
ACELXCANPAXXXCTGC

SEQ ID NO: 6883 - protein, 17 aa, Artificial Sequence
  Synthetically generated peptide
  VARIANT (1)..(17): Xaa = Any Amino Acid
ACELXCANPAXXCXTGC

SEQ ID NO: 6884 - protein, 17 aa, Artificial Sequence
  Synthetically generated peptide
  VARIANT (1)..(17): Xaa = Any Amino Acid
ACELXCANPAXXCTXGC

SEQ ID NO: 6885 - protein, 17 aa, Artificial Sequence
  Synthetically generated peptide
  VARIANT (1)..(17): Xaa = Any Amino Acid
ACELXCANPAXXCTGXC

SEQ ID NO: 6886 - protein, 16 aa, Artificial Sequence
  Synthetically generated peptide
  VARIANT (1)..(16): Xaa = Any Amino Acid
ACELXCANPAXCXTGC

SEQ ID NO: 6887 - protein, 17 aa, Artificial Sequence
  Synthetically generated peptide
  VARIANT (1)..(17): Xaa = Any Amino Acid
ACELXCANPAXCXXTGC

SEQ ID NO: 6888 - protein, 17 aa, Artificial Sequence
  Synthetically generated peptide
  VARIANT (1)..(17): Xaa = Any Amino Acid
ACELXCANPAXCXTXGC

SEQ ID NO: 6889 - protein, 17 aa, Artificial Sequence
  Synthetically generated peptide
  VARIANT (1)..(17): Xaa = Any Amino Acid
ACELXCANPAXCXTGXC

SEQ ID NO: 6890 - protein, 16 aa, Artificial Sequence
  Synthetically generated peptide
  VARIANT (1)..(16): Xaa = Any Amino Acid
ACELXCANPAXCTXGC

SEQ ID NO: 6891 - protein, 17 aa, Artificial Sequence
  Synthetically generated peptide
  VARIANT (1)..(17): Xaa = Any Amino Acid
ACELXCANPAXCTXXGC

SEQ ID NO: 6892 - protein, 17 aa, Artificial Sequence
  Synthetically generated peptide
  VARIANT (1)..(17): Xaa = Any Amino Acid
ACELXCANPAXCTXGXC

SEQ ID NO: 6893 - protein, 16 aa, Artificial Sequence
  Synthetically generated peptide
  VARIANT (1)..(16): Xaa = Any Amino Acid
ACELXCANPAXCTGXC

SEQ ID NO: 6894 - protein, 17 aa, Artificial Sequence
  Synthetically generated peptide
  VARIANT (1)..(17): Xaa = Any Amino Acid
ACELXCANPAXCTGXXC

SEQ ID NO: 6895 - protein, 15 aa, Artificial Sequence
  Synthetically generated peptide
  VARIANT (1)..(15): Xaa = Any Amino Acid
ACELXCANPACXTGC

SEQ ID NO: 6896 - protein, 16 aa, Artificial Sequence
  Synthetically generated peptide
  VARIANT (1)..(16): Xaa = Any Amino Acid
ACELXCANPACXXTGC

SEQ ID NO: 6897 - protein, 17 aa, Artificial Sequence
  Synthetically generated peptide
  VARIANT (1)..(17): Xaa = Any Amino Acid
ACELXCANPACXXXTGC

SEQ ID NO: 6898 - protein, 17 aa, Artificial Sequence
  Synthetically generated peptide
  VARIANT (1)..(17): Xaa = Any Amino Acid
ACELXCANPACXXTXGC

SEQ ID NO: 6899 - protein, 17 aa, Artificial Sequence
  Synthetically generated peptide
  VARIANT (1)..(17): Xaa = Any Amino Acid
ACELXCANPACXXTGXC

SEQ ID NO: 6900 - protein, 16 aa, Artificial Sequence
  Synthetically generated peptide
  VARIANT (1)..(16): Xaa = Any Amino Acid
ACELXCANPACXTXGC

SEQ ID NO: 6901 - protein, 17 aa, Artificial Sequence
  Synthetically generated peptide
  VARIANT (1)..(17): Xaa = Any Amino Acid
ACELXCANPACXTXXGC

SEQ ID NO: 6902 - protein, 17 aa, Artificial Sequence
  Synthetically generated peptide
  VARIANT (1)..(17): Xaa = Any Amino Acid
ACELXCANPACXTXGXC

SEQ ID NO: 6903 - protein, 16 aa, Artificial Sequence
  Synthetically generated peptide
  VARIANT (1)..(16): Xaa = Any Amino Acid
ACELXCANPACXTGXC

SEQ ID NO: 6904 - protein, 17 aa, Artificial Sequence
  Synthetically generated peptide
  VARIANT (1)..(17): Xaa = Any Amino Acid
ACELXCANPACXTGXXC

SEQ ID NO: 6905 - protein, 15 aa, Artificial Sequence
  Synthetically generated peptide
  VARIANT (1)..(15): Xaa = Any Amino Acid
ACELXCANPACTXGC

SEQ ID NO: 6906 - protein, 16 aa, Artificial Sequence
  Synthetically generated peptide
  VARIANT (1)..(16): Xaa = Any Amino Acid
ACELXCANPACTXXGC

SEQ ID NO: 6907 - protein, 17 aa, Artificial Sequence
  Synthetically generated peptide
  VARIANT (1)..(17): Xaa = Any Amino Acid
ACELXCANPACTXXXGC

SEQ ID NO: 6908 - protein, 17 aa, Artificial Sequence
  Synthetically generated peptide
  VARIANT (1)..(17): Xaa = Any Amino Acid
ACELXCANPACTXXGXC

SEQ ID NO: 6909 - protein, 16 aa, Artificial Sequence
  Synthetically generated peptide
  VARIANT (1)..(16): Xaa = Any Amino Acid
ACELXCANPACTXGXC

SEQ ID NO: 6910 - protein, 17 aa, Artificial Sequence
  Synthetically generated peptide
  VARIANT (1)..(17): Xaa = Any Amino Acid
ACELXCANPACTXGXXC

SEQ ID NO: 6911 - protein, 15 aa, Artificial Sequence
  Synthetically generated peptide
  VARIANT (1)..(15): Xaa = Any Amino Acid
ACELXCANPACTGXC

SEQ ID NO: 6912 - protein, 16 aa, Artificial Sequence
  Synthetically generated peptide
  VARIANT (1)..(16): Xaa = Any Amino Acid
ACELXCANPACTGXXC

SEQ ID NO: 6913 - protein, 17 aa, Artificial Sequence
  Synthetically generated peptide
  VARIANT (1)..(17): Xaa = Any Amino Acid
ACELXCANPACTGXXXC

SEQ ID NO: 6914 - protein, 14 aa, Artificial Sequence
  Synthetically generated peptide
  VARIANT (1)..(14): Xaa = Any Amino Acid
ACELCAXNPACTGC

SEQ ID NO: 6915 - protein, 15 aa, Artificial Sequence
  Synthetically generated peptide
  VARIANT (1)..(15): Xaa = Any Amino Acid
ACELCAXXNPACTGC

SEQ ID NO: 6916 - protein, 16 aa, Artificial Sequence
  Synthetically generated peptide
  VARIANT (1)..(16): Xaa = Any Amino Acid
ACELCAXXXNPACTGC

SEQ ID NO: 6917 - protein, 17 aa, Artificial Sequence
  Synthetically generated peptide
  VARIANT (1)..(17): Xaa = Any Amino Acid
ACELCAXXXXNPACTGC

SEQ ID NO: 6918 - protein, 17 aa, Artificial Sequence
  Synthetically generated peptide
  VARIANT (1)..(17): Xaa = Any Amino Acid
ACELCAXXXNXPACTGC

SEQ ID NO: 6919 - protein, 17 aa, Artificial Sequence
  Synthetically generated peptide
  VARIANT (1)..(17): Xaa = Any Amino Acid
ACELCAXXXNPXACTGC

SEQ ID NO: 6920 - protein, 17 aa, Artificial Sequence
  Synthetically generated peptide
  VARIANT (1)..(17): Xaa = Any Amino Acid
ACELCAXXXNPAXCTGC

SEQ ID NO: 6921 - protein, 17 aa, Artificial Sequence
  Synthetically generated peptide
  VARIANT (1)..(17): Xaa = Any Amino Acid
ACELCAXXXNPACXTGC

SEQ ID NO: 6922 - protein, 17 aa, Artificial Sequence
  Synthetically generated peptide
  VARIANT (1)..(17): Xaa = Any Amino Acid
ACELCAXXXNPACTXGC

SEQ ID NO: 6923 - protein, 17 aa, Artificial Sequence
  Synthetically generated peptide
  VARIANT (1)..(17): Xaa = Any Amino Acid
ACELCAXXXNPACTGXC

SEQ ID NO: 6924 - protein, 16 aa, Artificial Sequence
  Synthetically generated peptide
  VARIANT (1)..(16): Xaa = Any Amino Acid
ACELCAXXNXPACTGC

SEQ ID NO: 6925 - protein, 17 aa, Artificial Sequence
  Synthetically generated peptide
  VARIANT (1)..(17): Xaa = Any Amino Acid
ACELCAXXNXXPACTGC

SEQ ID NO: 6926 - protein, 17 aa, Artificial Sequence
  Synthetically generated peptide
  VARIANT (1)..(17): Xaa = Any Amino Acid
ACELCAXXNXPXACTGC

SEQ ID NO: 6927 - protein, 17 aa, Artificial Sequence
  Synthetically generated peptide
  VARIANT (1)..(17): Xaa = Any Amino Acid
ACELCAXXNXPAXCTGC

SEQ ID NO: 6928 - protein, 17 aa, Artificial Sequence
  Synthetically generated peptide
  VARIANT (1)..(17): Xaa = Any Amino Acid
ACELCAXXNXPACXTGC

SEQ ID NO: 6929 - protein, 17 aa, Artificial Sequence
  Synthetically generated peptide
  VARIANT (1)..(17): Xaa = Any Amino Acid
ACELCAXXNXPACTXGC

SEQ ID NO: 6930 - protein, 17 aa, Artificial Sequence
  Synthetically generated peptide
  VARIANT (1)..(17): Xaa = Any Amino Acid
ACELCAXXNXPACTGXC

SEQ ID NO: 6931 - protein, 16 aa, Artificial Sequence
  Synthetically generated peptide
  VARIANT (1)..(16): Xaa = Any Amino Acid
ACELCAXXNPXACTGC

SEQ ID NO: 6932 - protein, 17 aa, Artificial Sequence
  Synthetically generated peptide
  VARIANT (1)..(17): Xaa = Any Amino Acid
ACELCAXXNPXXACTGC

SEQ ID NO: 6933 - protein, 17 aa, Artificial Sequence
  Synthetically generated peptide
  VARIANT (1)..(17): Xaa = Any Amino Acid
ACELCAXXNPXAXCTGC

SEQ ID NO: 6934 - protein, 17 aa, Artificial Sequence
  Synthetically generated peptide
  VARIANT (1)..(17): Xaa = Any Amino Acid
ACELCAXXNPXACXTGC

SEQ ID NO: 6935 - protein, 17 aa, Artificial Sequence
  Synthetically generated peptide
  VARIANT (1)..(17): Xaa = Any Amino Acid
ACELCAXXNPXACTXGC

SEQ ID NO: 6936 - protein, 17 aa, Artificial Sequence
  Synthetically generated peptide
  VARIANT (1)..(17): Xaa = Any Amino Acid
ACELCAXXNPXACTGXC

SEQ ID NO: 6937 - protein, 16 aa, Artificial Sequence
  Synthetically generated peptide
  VARIANT (1)..(16): Xaa = Any Amino Acid
ACELCAXXNPAXCTGC

SEQ ID NO: 6938 - protein, 17 aa, Artificial Sequence
  Synthetically generated peptide
  VARIANT (1)..(17): Xaa = Any Amino Acid
ACELCAXXNPAXXCTGC

SEQ ID NO: 6939 - protein, 17 aa, Artificial Sequence
  Synthetically generated peptide
  VARIANT (1)..(17): Xaa = Any Amino Acid
ACELCAXXNPAXCXTGC

SEQ ID NO: 6940 - protein, 17 aa, Artificial Sequence
  Synthetically generated peptide
  VARIANT (1)..(17): Xaa = Any Amino Acid
ACELCAXXNPAXCTXGC

SEQ ID NO: 6941 - protein, 17 aa, Artificial Sequence
  Synthetically generated peptide
  VARIANT (1)..(17): Xaa = Any Amino Acid
ACELCAXXNPAXCTGXC

SEQ ID NO: 6942 - protein, 16 aa, Artificial Sequence
  Synthetically generated peptide
  VARIANT (1)..(16): Xaa = Any Amino Acid
ACELCAXXNPACXTGC

SEQ ID NO: 6943 - protein, 17 aa, Artificial Sequence
  Synthetically generated peptide
  VARIANT (1)..(17): Xaa = Any Amino Acid
ACELCAXXNPACXXTGC

SEQ ID NO: 6944 - protein, 17 aa, Artificial Sequence
  Synthetically generated peptide
  VARIANT (1)..(17): Xaa = Any Amino Acid
ACELCAXXNPACXTXGC

SEQ ID NO: 6945 - protein, 17 aa, Artificial Sequence
  Synthetically generated peptide
  VARIANT (1)..(17): Xaa = Any Amino Acid
ACELCAXXNPACXTGXC

SEQ ID NO: 6946 - protein, 16 aa, Artificial Sequence
  Synthetically generated peptide
  VARIANT (1)..(16): Xaa = Any Amino Acid
ACELCAXXNPACTXGC

SEQ ID NO: 6947 - protein, 17 aa, Artificial Sequence
  Synthetically generated peptide
  VARIANT (1)..(17): Xaa = Any Amino Acid
ACELCAXXNPACTXXGC

SEQ ID NO: 6948 - protein, 17 aa, Artificial Sequence
  Synthetically generated peptide
  VARIANT (1)..(17): Xaa = Any Amino Acid
ACELCAXXNPACTXGXC

SEQ ID NO: 6949 - protein, 16 aa, Artificial Sequence
  Synthetically generated peptide
  VARIANT (1)..(16): Xaa = Any Amino Acid
ACELCAXXNPACTGXC

SEQ ID NO: 6950 - protein, 17 aa, Artificial Sequence
  Synthetically generated peptide
  VARIANT (1)..(17): Xaa = Any Amino Acid
ACELCAXXNPACTGXXC

SEQ ID NO: 6951 - protein, 15 aa, Artificial Sequence
  Synthetically generated peptide
  VARIANT (1)..(15): Xaa = Any Amino Acid
ACELCAXNXPACTGC

SEQ ID NO: 6952 - protein, 16 aa, Artificial Sequence
  Synthetically generated peptide
  VARIANT (1)..(16): Xaa = Any Amino Acid
ACELCAXNXXPACTGC

SEQ ID NO: 6953 - protein, 17 aa, Artificial Sequence
  Synthetically generated peptide
  VARIANT (1)..(17): Xaa = Any Amino Acid
ACELCAXNXXXPACTGC

SEQ ID NO: 6954 - protein, 17 aa, Artificial Sequence
  Synthetically generated peptide
  VARIANT (1)..(17): Xaa = Any Amino Acid
ACELCAXNXXPXACTGC

SEQ ID NO: 6955 - protein, 17 aa, Artificial Sequence
  Synthetically generated peptide
  VARIANT (1)..(17): Xaa = Any Amino Acid
ACELCAXNXXPAXCTGC

SEQ ID NO: 6956 - protein, 17 aa, Artificial Sequence
  Synthetically generated peptide
  VARIANT (1)..(17): Xaa = Any Amino Acid
ACELCAXNXXPACXTGC

SEQ ID NO: 6957 - protein, 17 aa, Artificial Sequence
  Synthetically generated peptide
  VARIANT (1)..(17): Xaa = Any Amino Acid
ACELCAXNXXPACTXGC

SEQ ID NO: 6958 - protein, 17 aa, Artificial Sequence
  Synthetically generated peptide
  VARIANT (1)..(17): Xaa = Any Amino Acid
ACELCAXNXXPACTGXC

SEQ ID NO: 6959 - protein, 16 aa, Artificial Sequence
  Synthetically generated peptide
  VARIANT (1)..(16): Xaa = Any Amino Acid
ACELCAXNXPXACTGC

SEQ ID NO: 6960 - protein, 17 aa, Artificial Sequence
  Synthetically generated peptide
  VARIANT (1)..(17): Xaa = Any Amino Acid
ACELCAXNXPXXACTGC

SEQ ID NO: 6961 - protein, 17 aa, Artificial Sequence
  Synthetically generated peptide
  VARIANT (1)..(17): Xaa = Any Amino Acid
ACELCAXNXPXAXCTGC

SEQ ID NO: 6962 - protein, 17 aa, Artificial Sequence
  Synthetically generated peptide
  VARIANT (1)..(17): Xaa = Any Amino Acid
ACELCAXNXPXACXTGC

SEQ ID NO: 6963 - protein, 17 aa, Artificial Sequence
  Synthetically generated peptide
  VARIANT (1)..(17): Xaa = Any Amino Acid
ACELCAXNXPXACTXGC

SEQ ID NO: 6964 - protein, 17 aa, Artificial Sequence
  Synthetically generated peptide
  VARIANT (1)..(17): Xaa = Any Amino Acid
ACELCAXNXPXACTGXC

SEQ ID NO: 6965 - protein, 16 aa, Artificial Sequence
  Synthetically generated peptide
  VARIANT (1)..(16): Xaa = Any Amino Acid
ACELCAXNXPAXCTGC

SEQ ID NO: 6966 - protein, 17 aa, Artificial Sequence
  Synthetically generated peptide
  VARIANT (1)..(17): Xaa = Any Amino Acid
ACELCAXNXPAXXCTGC

SEQ ID NO: 6967 - protein, 17 aa, Artificial Sequence
  Synthetically generated peptide
  VARIANT (1)..(17): Xaa = Any Amino Acid
ACELCAXNXPAXCXTGC

SEQ ID NO: 6968 - protein, 17 aa, Artificial Sequence
  Synthetically generated peptide
  VARIANT (1)..(17): Xaa = Any Amino Acid
ACELCAXNXPAXCTXGC

SEQ ID NO: 6969 - protein, 17 aa, Artificial Sequence
  Synthetically generated peptide
  VARIANT (1)..(17): Xaa = Any Amino Acid
ACELCAXNXPAXCTGXC

SEQ ID NO: 6970 - protein, 16 aa, Artificial Sequence
  Synthetically generated peptide
  VARIANT (1)..(16): Xaa = Any Amino Acid
ACELCAXNXPACXTGC

SEQ ID NO: 6971 - protein, 17 aa, Artificial Sequence
  Synthetically generated peptide
  VARIANT (1)..(17): Xaa = Any Amino Acid
ACELCAXNXPACXXTGC

SEQ ID NO: 6972 - protein, 17 aa, Artificial Sequence
  Synthetically generated peptide
  VARIANT (1)..(17): Xaa = Any Amino Acid
ACELCAXNXPACXTXGC

SEQ ID NO: 6973 - protein, 17 aa, Artificial Sequence
  Synthetically generated peptide
  VARIANT (1)..(17): Xaa = Any Amino Acid
ACELCAXNXPACXTGXC

SEQ ID NO: 6974 - protein, 16 aa, Artificial Sequence
  Synthetically generated peptide
  VARIANT (1)..(16): Xaa = Any Amino Acid
ACELCAXNXPACTXGC

SEQ ID NO: 6975 - protein, 17 aa, Artificial Sequence
  Synthetically generated peptide
  VARIANT (1)..(17): Xaa = Any Amino Acid
ACELCAXNXPACTXXGC

SEQ ID NO: 6976 - protein, 17 aa, Artificial Sequence
  Synthetically generated peptide
  VARIANT (1)..(17): Xaa = Any Amino Acid
ACELCAXNXPACTXGXC

SEQ ID NO: 6977 - protein, 16 aa, Artificial Sequence
  Synthetically generated peptide
  VARIANT (1)..(16): Xaa = Any Amino Acid
ACELCAXNXPACTGXC

SEQ ID NO: 6978 - protein, 17 aa, Artificial Sequence
  Synthetically generated peptide
  VARIANT (1)..(17): Xaa = Any Amino Acid
ACELCAXNXPACTGXXC

SEQ ID NO: 6979 - protein, 15 aa, Artificial Sequence
  Synthetically generated peptide
  VARIANT (1)..(15): Xaa = Any Amino Acid
ACELCAXNPXACTGC

SEQ ID NO: 6980 - protein, 16 aa, Artificial Sequence
  Synthetically generated peptide
  VARIANT (1)..(16): Xaa = Any Amino Acid
ACELCAXNPXXACTGC

SEQ ID NO: 6981 - protein, 17 aa, Artificial Sequence
  Synthetically generated peptide
  VARIANT (1)..(17): Xaa = Any Amino Acid
ACELCAXNPXXXACTGC

SEQ ID NO: 6982 - protein, 17 aa, Artificial Sequence
  Synthetically generated peptide
  VARIANT (1)..(17): Xaa = Any Amino Acid
ACELCAXNPXXAXCTGC

SEQ ID NO: 6983 - protein, 17 aa, Artificial Sequence
  Synthetically generated peptide
  VARIANT (1)..(17): Xaa = Any Amino Acid
ACELCAXNPXXACXTGC

SEQ ID NO: 6984 - protein, 17 aa, Artificial Sequence
  Synthetically generated peptide
  VARIANT (1)..(17): Xaa = Any Amino Acid
ACELCAXNPXXACTXGC

SEQ ID NO: 6985 - protein, 17 aa, Artificial Sequence
  Synthetically generated peptide
  VARIANT (1)..(17): Xaa = Any Amino Acid
ACELCAXNPXXACTGXC

SEQ ID NO: 6986 - protein, 16 aa, Artificial Sequence
  Synthetically generated peptide
  VARIANT (1)..(16): Xaa = Any Amino Acid
ACELCAXNPXAXCTGC

SEQ ID NO: 6987 - protein, 17 aa, Artificial Sequence
  Synthetically generated peptide
  VARIANT (1)..(17): Xaa = Any Amino Acid
ACELCAXNPXAXXCTGC

SEQ ID NO: 6988 - protein, 17 aa, Artificial Sequence
  Synthetically generated peptide
  VARIANT (1)..(17): Xaa = Any Amino Acid
ACELCAXNPXAXCXTGC

SEQ ID NO: 6989 - protein, 17 aa, Artificial Sequence
  Synthetically generated peptide
  VARIANT (1)..(17): Xaa = Any Amino Acid
ACELCAXNPXAXCTXGC

SEQ ID NO: 6990 - protein, 17 aa, Artificial Sequence
  Synthetically generated peptide
  VARIANT (1)..(17): Xaa = Any Amino Acid
ACELCAXNPXAXCTGXC

SEQ ID NO: 6991 - protein, 16 aa, Artificial Sequence
  Synthetically generated peptide
  VARIANT (1)..(16): Xaa = Any Amino Acid
ACELCAXNPXACXTGC

SEQ ID NO: 6992 - protein, 17 aa, Artificial Sequence
  Synthetically generated peptide
  VARIANT (1)..(17): Xaa = Any Amino Acid
ACELCAXNPXACXXTGC

SEQ ID NO: 6993 - protein, 17 aa, Artificial Sequence
  Synthetically generated peptide
  VARIANT (1)..(17): Xaa = Any Amino Acid
ACELCAXNPXACXTXGC

SEQ ID NO: 6994 - protein, 17 aa, Artificial Sequence
  Synthetically generated peptide
  VARIANT (1)..(17): Xaa = Any Amino Acid
ACELCAXNPXACXTGXC

SEQ ID NO: 6995 - protein, 16 aa, Artificial Sequence
  Synthetically generated peptide
  VARIANT (1)..(16): Xaa = Any Amino Acid
ACELCAXNPXACTXGC

SEQ ID NO: 6996 - protein, 17 aa, Artificial Sequence
  Synthetically generated peptide
  VARIANT (1)..(17): Xaa = Any Amino Acid
ACELCAXNPXACTXXGC

SEQ ID NO: 6997 - protein, 17 aa, Artificial Sequence
  Synthetically generated peptide
  VARIANT (1)..(17): Xaa = Any Amino Acid
ACELCAXNPXACTXGXC

SEQ ID NO: 6998 - protein, 16 aa, Artificial Sequence
  Synthetically generated peptide
  VARIANT (1)..(16): Xaa = Any Amino Acid
ACELCAXNPXACTGXC

SEQ ID NO: 6999 - protein, 17 aa, Artificial Sequence
  Synthetically generated peptide
  VARIANT (1)..(17): Xaa = Any Amino Acid
ACELCAXNPXACTGXXC

SEQ ID NO: 7000 - protein, 15 aa, Artificial Sequence
  Synthetically generated peptide
  VARIANT (1)..(15): Xaa = Any Amino Acid
ACELCAXNPAXCTGC

SEQ ID NO: 7001 - protein, 16 aa, Artificial Sequence
  Synthetically generated peptide
  VARIANT (1)..(16): Xaa = Any Amino Acid
ACELCAXNPAXXCTGC

SEQ ID NO: 7002 - protein, 17 aa, Artificial Sequence
  Synthetically generated peptide
  VARIANT (1)..(17): Xaa = Any Amino Acid
ACELCAXNPAXXXCTGC

SEQ ID NO: 7003 - protein, 17 aa, Artificial Sequence
  Synthetically generated peptide
  VARIANT (1)..(17): Xaa = Any Amino Acid
ACELCAXNPAXXCXTGC

SEQ ID NO: 7004 - protein, 17 aa, Artificial Sequence
  Synthetically generated peptide
  VARIANT (1)..(17): Xaa = Any Amino Acid
ACELCAXNPAXXCTXGC

SEQ ID NO: 7005 - protein, 17 aa, Artificial Sequence
  Synthetically generated peptide
  VARIANT (1)..(17): Xaa = Any Amino Acid
ACELCAXNPAXXCTGXC

SEQ ID NO: 7006 - protein, 16 aa, Artificial Sequence
  Synthetically generated peptide
  VARIANT (1)..(16): Xaa = Any Amino Acid
ACELCAXNPAXCXTGC

SEQ ID NO: 7007 - protein, 17 aa, Artificial Sequence
  Synthetically generated peptide
  VARIANT (1)..(17): Xaa = Any Amino Acid
ACELCAXNPAXCXXTGC

SEQ ID NO: 7008 - protein, 17 aa, Artificial Sequence
  Synthetically generated peptide
  VARIANT (1)..(17): Xaa = Any Amino Acid
ACELCAXNPAXCXTXGC

SEQ ID NO: 7009 - protein, 17 aa, Artificial Sequence
  Synthetically generated peptide
  VARIANT (1)..(17): Xaa = Any Amino Acid
ACELCAXNPAXCXTGXC

SEQ ID NO: 7010 - protein, 16 aa, Artificial Sequence
  Synthetically generated peptide
  VARIANT (1)..(16): Xaa = Any Amino Acid
ACELCAXNPAXCTXGC

SEQ ID NO: 7011 - protein, 17 aa, Artificial Sequence
  Synthetically generated peptide
  VARIANT (1)..(17): Xaa = Any Amino Acid
ACELCAXNPAXCTXXGC

SEQ ID NO: 7012 - protein, 17 aa, Artificial Sequence
  Synthetically generated peptide
  VARIANT (1)..(17): Xaa = Any Amino Acid
ACELCAXNPAXCTXGXC

SEQ ID NO: 7013 - protein, 16 aa, Artificial Sequence
  Synthetically generated peptide
  VARIANT (1)..(16): Xaa = Any Amino Acid
ACELCAXNPAXCTGXC

SEQ ID NO: 7014 - protein, 17 aa, Artificial Sequence
  Synthetically generated peptide
  VARIANT (1)..(17): Xaa = Any Amino Acid
ACELCAXNPAXCTGXXC

SEQ ID NO: 7015 - protein, 15 aa, Artificial Sequence
  Synthetically generated peptide
  VARIANT (1)..(15): Xaa = Any Amino Acid
ACELCAXNPACXTGC

SEQ ID NO: 7016 - protein, 16 aa, Artificial Sequence
  Synthetically generated peptide
  VARIANT (1)..(16): Xaa = Any Amino Acid
ACELCAXNPACXXTGC

SEQ ID NO: 7017 - protein, 17 aa, Artificial Sequence
  Synthetically generated peptide
  VARIANT (1)..(17): Xaa = Any Amino Acid
ACELCAXNPACXXXTGC

SEQ ID NO: 7018 - protein, 17 aa, Artificial Sequence
  Synthetically generated peptide
  VARIANT (1)..(17): Xaa = Any Amino Acid
ACELCAXNPACXXTXGC

SEQ ID NO: 7019 - protein, 17 aa, Artificial Sequence
  Synthetically generated peptide
  VARIANT (1)..(17): Xaa = Any Amino Acid
ACELCAXNPACXXTGXC

SEQ ID NO: 7020 - protein, 16 aa, Artificial Sequence
  Synthetically generated peptide
  VARIANT (1)..(16): Xaa = Any Amino Acid
ACELCAXNPACXTXGC

SEQ ID NO: 7021 - protein, 17 aa, Artificial Sequence
  Synthetically generated peptide
  VARIANT (1)..(17): Xaa = Any Amino Acid
ACELCAXNPACXTXXGC

SEQ ID NO: 7022 - protein, 17 aa, Artificial Sequence
  Synthetically generated peptide
  VARIANT (1)..(17): Xaa = Any Amino Acid
ACELCAXNPACXTXGXC

SEQ ID NO: 7023 - protein, 16 aa, Artificial Sequence
  Synthetically generated peptide
  VARIANT (1)..(16): Xaa = Any Amino Acid
ACELCAXNPACXTGXC

SEQ ID NO: 7024 - protein, 17 aa, Artificial Sequence
  Synthetically generated peptide
  VARIANT (1)..(17): Xaa = Any Amino Acid
ACELCAXNPACXTGXXC

SEQ ID NO: 7025 - protein, 15 aa, Artificial Sequence
  Synthetically generated peptide
  VARIANT (1)..(15): Xaa = Any Amino Acid
ACELCAXNPACTXGC

SEQ ID NO: 7026 - protein, 16 aa, Artificial Sequence
  Synthetically generated peptide
  VARIANT (1)..(16): Xaa = Any Amino Acid
ACELCAXNPACTXXGC

SEQ ID NO: 7027 - protein, 17 aa, Artificial Sequence
  Synthetically generated peptide
  VARIANT (1)..(17): Xaa = Any Amino Acid
ACELCAXNPACTXXXGC

SEQ ID NO: 7028 - protein, 17 aa, Artificial Sequence
  Synthetically generated peptide
  VARIANT (1)..(17): Xaa = Any Amino Acid
ACELCAXNPACTXXGXC

SEQ ID NO: 7029 - protein, 16 aa, Artificial Sequence
  Synthetically generated peptide
  VARIANT (1)..(16): Xaa = Any Amino Acid
ACELCAXNPACTXGXC

SEQ ID NO: 7030 - protein, 17 aa, Artificial Sequence
  Synthetically generated peptide
  VARIANT (1)..(17): Xaa = Any Amino Acid
ACELCAXNPACTXGXXC

SEQ ID NO: 7031 - protein, 15 aa, Artificial Sequence
  Synthetically generated peptide
  VARIANT (1)..(15): Xaa = Any Amino Acid
ACELCAXNPACTGXC

SEQ ID NO: 7032 - protein, 16 aa, Artificial Sequence
  Synthetically generated peptide
  VARIANT (1)..(16): Xaa = Any Amino Acid
ACELCAXNPACTGXXC

SEQ ID NO: 7033 - protein, 17 aa, Artificial Sequence
  Synthetically generated peptide
  VARIANT (1)..(17): Xaa = Any Amino Acid
ACELCAXNPACTGXXXC

SEQ ID NO: 7034 - protein, 14 aa, Artificial Sequence
  Synthetically generated peptide
  VARIANT (1)..(14): Xaa = Any Amino Acid
ACELCANXPACTGC

SEQ ID NO: 7035 - protein, 15 aa, Artificial Sequence
  Synthetically generated peptide
  VARIANT (1)..(15): Xaa = Any Amino Acid
ACELCANXXPACTGC

SEQ ID NO: 7036 - protein, 16 aa, Artificial Sequence
  Synthetically generated peptide
  VARIANT (1)..(16): Xaa = Any Amino Acid
ACELCANXXXPACTGC

SEQ ID NO: 7037 - protein, 17 aa, Artificial Sequence
  Synthetically generated peptide
  VARIANT (1)..(17): Xaa = Any Amino Acid
ACELCANXXXXPACTGC

SEQ ID NO: 7038 - protein, 17 aa, Artificial Sequence
  Synthetically generated peptide
  VARIANT (1)..(17): Xaa = Any Amino Acid
ACELCANXXXPXACTGC

SEQ ID NO: 7039 - protein, 17 aa, Artificial Sequence
  Synthetically generated peptide
  VARIANT (1)..(17): Xaa = Any Amino Acid
ACELCANXXXPAXCTGC

SEQ ID NO: 7040 - protein, 17 aa, Artificial Sequence
  Synthetically generated peptide
  VARIANT (1)..(17): Xaa = Any Amino Acid
ACELCANXXXPACXTGC

SEQ ID NO: 7041 - protein, 17 aa, Artificial Sequence
  Synthetically generated peptide
  VARIANT (1)..(17): Xaa = Any Amino Acid
ACELCANXXXPACTXGC

SEQ ID NO: 7042 - protein, 17 aa, Artificial Sequence
  Synthetically generated peptide
  VARIANT (1)..(17): Xaa = Any Amino Acid
ACELCANXXXPACTGXC

SEQ ID NO: 7043 - protein, 16 aa, Artificial Sequence
  Synthetically generated peptide
  VARIANT (1)..(16): Xaa = Any Amino Acid
ACELCANXXPXACTGC

SEQ ID NO: 7044 - protein, 17 aa, Artificial Sequence
  Synthetically generated peptide
  VARIANT (1)..(17): Xaa = Any Amino Acid
ACELCANXXPXXACTGC

SEQ ID NO: 7045 - protein, 17 aa, Artificial Sequence
  Synthetically generated peptide
  VARIANT (1)..(17): Xaa = Any Amino Acid
ACELCANXXPXAXCTGC

SEQ ID NO: 7046 - protein, 17 aa, Artificial Sequence
  Synthetically generated peptide
  VARIANT (1)..(17): Xaa = Any Amino Acid
ACELCANXXPXACXTGC

SEQ ID NO: 7047 - protein, 17 aa, Artificial Sequence
  Synthetically generated peptide
  VARIANT (1)..(17): Xaa = Any Amino Acid
ACELCANXXPXACTXGC

SEQ ID NO: 7048 - protein, 17 aa, Artificial Sequence
  Synthetically generated peptide
  VARIANT (1)..(17): Xaa = Any Amino Acid
ACELCANXXPXACTGXC

SEQ ID NO: 7049 - protein, 16 aa, Artificial Sequence
  Synthetically generated peptide
  VARIANT (1)..(16): Xaa = Any Amino Acid
ACELCANXXPAXCTGC

SEQ ID NO: 7050 - protein, 17 aa, Artificial Sequence
  Synthetically generated peptide
  VARIANT (1)..(17): Xaa = Any Amino Acid
ACELCANXXPAXXCTGC

SEQ ID NO: 7051 - protein, 17 aa, Artificial Sequence
  Synthetically generated peptide
  VARIANT (1)..(17): Xaa = Any Amino Acid
ACELCANXXPAXCXTGC

SEQ ID NO: 7052 - protein, 17 aa, Artificial Sequence
  Synthetically generated peptide
  VARIANT (1)..(17): Xaa = Any Amino Acid
ACELCANXXPAXCTXGC

SEQ ID NO: 7053 - protein, 17 aa, Artificial Sequence
  Synthetically generated peptide
  VARIANT (1)..(17): Xaa = Any Amino Acid
ACELCANXXPAXCTGXC

SEQ ID NO: 7054 - protein, 16 aa, Artificial Sequence
  Synthetically generated peptide
  VARIANT (1)..(16): Xaa = Any Amino Acid
ACELCANXXPACXTGC

SEQ ID NO: 7055 - protein, 17 aa, Artificial Sequence
  Synthetically generated peptide
  VARIANT (1)..(17): Xaa = Any Amino Acid
ACELCANXXPACXXTGC

SEQ ID NO: 7056 - protein, 17 aa, Artificial Sequence
  Synthetically generated peptide
  VARIANT (1)..(17): Xaa = Any Amino Acid
ACELCANXXPACXTXGC

SEQ ID NO: 7057 - protein, 17 aa, Artificial Sequence
  Synthetically generated peptide
  VARIANT (1)..(17): Xaa = Any Amino Acid
ACELCANXXPACXTGXC

SEQ ID NO: 7058 - protein, 16 aa, Artificial Sequence
  Synthetically generated peptide
  VARIANT (1)..(16): Xaa = Any Amino Acid
ACELCANXXPACTXGC

SEQ ID NO: 7059 - protein, 17 aa, Artificial Sequence
  Synthetically generated peptide
  VARIANT (1)..(17): Xaa = Any Amino Acid
ACELCANXXPACTXXGC

SEQ ID NO: 7060 - protein, 17 aa, Artificial Sequence
  Synthetically generated peptide
  VARIANT (1)..(17): Xaa = Any Amino Acid
ACELCANXXPACTXGXC

SEQ ID NO: 7061 - protein, 16 aa, Artificial Sequence
  Synthetically generated peptide
  VARIANT (1)..(16): Xaa = Any Amino Acid
ACELCANXXPACTGXC

SEQ ID NO: 7062 - protein, 17 aa, Artificial Sequence
  Synthetically generated peptide
  VARIANT (1)..(17): Xaa = Any Amino Acid
ACELCANXXPACTGXXC

SEQ ID NO: 7063 - protein, 15 aa, Artificial Sequence
  Synthetically generated peptide
  VARIANT (1)..(15): Xaa = Any Amino Acid
ACELCANXPXACTGC

SEQ ID NO: 7064 - protein, 16 aa, Artificial Sequence
  Synthetically generated peptide
  VARIANT (1)..(16): Xaa = Any Amino Acid
ACELCANXPXXACTGC

SEQ ID NO: 7065 - protein, 17 aa, Artificial Sequence
  Synthetically generated peptide
  VARIANT (1)..(17): Xaa = Any Amino Acid
ACELCANXPXXXACTGC

SEQ ID NO: 7066 - protein, 17 aa, Artificial Sequence
  Synthetically generated peptide
  VARIANT (1)..(17): Xaa = Any Amino Acid
ACELCANXPXXAXCTGC

SEQ ID NO: 7067 - protein, 17 aa, Artificial Sequence
  Synthetically generated peptide
  VARIANT (1)..(17): Xaa = Any Amino Acid
ACELCANXPXXACXTGC

SEQ ID NO: 7068 - protein, 17 aa, Artificial Sequence
  Synthetically generated peptide
  VARIANT (1)..(17): Xaa = Any Amino Acid
ACELCANXPXXACTXGC

SEQ ID NO: 7069 - protein, 17 aa, Artificial Sequence
  Synthetically generated peptide
  VARIANT (1)..(17): Xaa = Any Amino Acid
ACELCANXPXXACTGXC

SEQ ID NO: 7070 - protein, 16 aa, Artificial Sequence
  Synthetically generated peptide
  VARIANT (1)..(16): Xaa = Any Amino Acid
ACELCANXPXAXCTGC

SEQ ID NO: 7071 - protein, 17 aa, Artificial Sequence
  Synthetically generated peptide
  VARIANT (1)..(17): Xaa = Any Amino Acid
ACELCANXPXAXXCTGC

SEQ ID NO: 7072 - protein, 17 aa, Artificial Sequence
  Synthetically generated peptide
  VARIANT (1)..(17): Xaa = Any Amino Acid
ACELCANXPXAXCXTGC

SEQ ID NO: 7073 - protein, 17 aa, Artificial Sequence
  Synthetically generated peptide
  VARIANT (1)..(17): Xaa = Any Amino Acid
ACELCANXPXAXCTXGC

SEQ ID NO: 7074 - protein, 17 aa, Artificial Sequence
  Synthetically generated peptide
  VARIANT (1)..(17): Xaa = Any Amino Acid
ACELCANXPXAXCTGXC

SEQ ID NO: 7075 - protein, 16 aa, Artificial Sequence
  Synthetically generated peptide
  VARIANT (1)..(16): Xaa = Any Amino Acid
ACELCANXPXACXTGC

SEQ ID NO: 7076 - protein, 17 aa, Artificial Sequence
  Synthetically generated peptide
  VARIANT (1)..(17): Xaa = Any Amino Acid
ACELCANXPXACXXTGC

SEQ ID NO: 7077 - protein, 17 aa, Artificial Sequence
  Synthetically generated peptide
  VARIANT (1)..(17): Xaa = Any Amino Acid
ACELCANXPXACXTXGC

SEQ ID NO: 7078 - protein, 17 aa, Artificial Sequence
  Synthetically generated peptide
  VARIANT (1)..(17): Xaa = Any Amino Acid
ACELCANXPXACXTGXC

SEQ ID NO: 7079 - protein, 16 aa, Artificial Sequence
  Synthetically generated peptide
  VARIANT (1)..(16): Xaa = Any Amino Acid
ACELCANXPXACTXGC

SEQ ID NO: 7080 - protein, 17 aa, Artificial Sequence
  Synthetically generated peptide
  VARIANT (1)..(17): Xaa = Any Amino Acid
ACELCANXPXACTXXGC

SEQ ID NO: 7081 - protein, 17 aa, Artificial Sequence
  Synthetically generated peptide
  VARIANT (1)..(17): Xaa = Any Amino Acid
ACELCANXPXACTXGXC

SEQ ID NO: 7082 - protein, 16 aa, Artificial Sequence
  Synthetically generated peptide
  VARIANT (1)..(16): Xaa = Any Amino Acid
ACELCANXPXACTGXC

SEQ ID NO: 7083 - protein, 17 aa, Artificial Sequence
  Synthetically generated peptide
  VARIANT (1)..(17): Xaa = Any Amino Acid
ACELCANXPXACTGXXC

SEQ ID NO: 7084 - protein, 15 aa, Artificial Sequence
  Synthetically generated peptide
  VARIANT (1)..(15): Xaa = Any Amino Acid
ACELCANXPAXCTGC

SEQ ID NO: 7085 - protein, 16 aa, Artificial Sequence
  Synthetically generated peptide
  VARIANT (1)..(16): Xaa = Any Amino Acid
ACELCANXPAXXCTGC

SEQ ID NO: 7086 - protein, 17 aa, Artificial Sequence
  Synthetically generated peptide
  VARIANT (1)..(17): Xaa = Any Amino Acid
ACELCANXPAXXXCTGC

SEQ ID NO: 7087 - protein, 17 aa, Artificial Sequence
  Synthetically generated peptide
  VARIANT (1)..(17): Xaa = Any Amino Acid
ACELCANXPAXXCXTGC

SEQ ID NO: 7088 - protein, 17 aa, Artificial Sequence
  Synthetically generated peptide
  VARIANT (1)..(17): Xaa = Any Amino Acid
ACELCANXPAXXCTXGC

SEQ ID NO: 7089 - protein, 17 aa, Artificial Sequence
  Synthetically generated peptide
  VARIANT (1)..(17): Xaa = Any Amino Acid
ACELCANXPAXXCTGXC

SEQ ID NO: 7090 - protein, 16 aa, Artificial Sequence
  Synthetically generated peptide
  VARIANT (1)..(16): Xaa = Any Amino Acid
ACELCANXPAXCXTGC

SEQ ID NO: 7091 - protein, 17 aa, Artificial Sequence
  Synthetically generated peptide
  VARIANT (1)..(17): Xaa = Any Amino Acid
ACELCANXPAXCXXTGC

SEQ ID NO: 7092 - protein, 17 aa, Artificial Sequence
  Synthetically generated peptide
  VARIANT (1)..(17): Xaa = Any Amino Acid
ACELCANXPAXCXTXGC

SEQ ID NO: 7093 - protein, 17 aa, Artificial Sequence
  Synthetically generated peptide
  VARIANT (1)..(17): Xaa = Any Amino Acid
ACELCANXPAXCXTGXC

SEQ ID NO: 7094 - protein, 16 aa, Artificial Sequence
  Synthetically generated peptide
  VARIANT (1)..(16): Xaa = Any Amino Acid
ACELCANXPAXCTXGC

SEQ ID NO: 7095 - protein, 17 aa, Artificial Sequence
  Synthetically generated peptide
  VARIANT (1)..(17): Xaa = Any Amino Acid
ACELCANXPAXCTXXGC

SEQ ID NO: 7096 - protein, 17 aa, Artificial Sequence
  Synthetically generated peptide
  VARIANT (1)..(17): Xaa = Any Amino Acid
ACELCANXPAXCTXGXC

SEQ ID NO: 7097 - protein, 16 aa, Artificial Sequence
  Synthetically generated peptide
  VARIANT (1)..(16): Xaa = Any Amino Acid
ACELCANXPAXCTGXC

SEQ ID NO: 7098 - protein, 17 aa, Artificial Sequence
  Synthetically generated peptide
  VARIANT (1)..(17): Xaa = Any Amino Acid
ACELCANXPAXCTGXXC

SEQ ID NO: 7099 - protein, 15 aa, Artificial Sequence
  Synthetically generated peptide
  VARIANT (1)..(15): Xaa = Any Amino Acid
ACELCANXPACXTGC

SEQ ID NO: 7100 - protein, 16 aa, Artificial Sequence
  Synthetically generated peptide
  VARIANT (1)..(16): Xaa = Any Amino Acid
ACELCANXPACXXTGC

SEQ ID NO: 7101 - protein, 17 aa, Artificial Sequence
  Synthetically generated peptide
  VARIANT (1)..(17): Xaa = Any Amino Acid
ACELCANXPACXXXTGC

SEQ ID NO: 7102 - protein, 17 aa, Artificial Sequence
  Synthetically generated peptide
  VARIANT (1)..(17): Xaa = Any Amino Acid
ACELCANXPACXXTXGC

SEQ ID NO: 7103 - protein, 17 aa, Artificial Sequence
  Synthetically generated peptide
  VARIANT (1)..(17): Xaa = Any Amino Acid
ACELCANXPACXXTGXC

SEQ ID NO: 7104 - protein, 16 aa, Artificial Sequence
  Synthetically generated peptide
  VARIANT (1)..(16): Xaa = Any Amino Acid
ACELCANXPACXTXGC

SEQ ID NO: 7105 - protein, 17 aa, Artificial Sequence
  Synthetically generated peptide
  VARIANT (1)..(17): Xaa = Any Amino Acid
ACELCANXPACXTXXGC

SEQ ID NO: 7106 - protein, 17 aa, Artificial Sequence
  Synthetically generated peptide
  VARIANT (1)..(17): Xaa = Any Amino Acid
ACELCANXPACXTXGXC

SEQ ID NO: 7107 - protein, 16 aa, Artificial Sequence
  Synthetically generated peptide
  VARIANT (1)..(16): Xaa = Any Amino Acid
ACELCANXPACXTGXC

SEQ ID NO: 7108 - protein, 17 aa, Artificial Sequence
  Synthetically generated peptide
  VARIANT (1)..(17): Xaa = Any Amino Acid
ACELCANXPACXTGXXC

SEQ ID NO: 7109 - protein, 15 aa, Artificial Sequence
  Synthetically generated peptide
  VARIANT (1)..(15): Xaa = Any Amino Acid
ACELCANXPACTXGC

SEQ ID NO: 7110 - protein, 16 aa, Artificial Sequence
  Synthetically generated peptide
  VARIANT (1)..(16): Xaa = Any Amino Acid
ACELCANXPACTXXGC

SEQ ID NO: 7111 - protein, 17 aa, Artificial Sequence
  Synthetically generated peptide
  VARIANT (1)..(17): Xaa = Any Amino Acid
ACELCANXPACTXXXGC

SEQ ID NO: 7112 - protein, 17 aa, Artificial Sequence
  Synthetically generated peptide
  VARIANT (1)..(17): Xaa = Any Amino Acid
ACELCANXPACTXXGXC

SEQ ID NO: 7113 - protein, 16 aa, Artificial Sequence
  Synthetically generated peptide
  VARIANT (1)..(16): Xaa = Any Amino Acid
ACELCANXPACTXGXC

SEQ ID NO: 7114 - protein, 17 aa, Artificial Sequence
  Synthetically generated peptide
  VARIANT (1)..(17): Xaa = Any Amino Acid
ACELCANXPACTXGXXC

SEQ ID NO: 7115 - protein, 15 aa, Artificial Sequence
  Synthetically generated peptide
  VARIANT (1)..(15): Xaa = Any Amino Acid
ACELCANXPACTGXC

SEQ ID NO: 7116 - protein, 16 aa, Artificial Sequence
  Synthetically generated peptide
  VARIANT (1)..(16): Xaa = Any Amino Acid
ACELCANXPACTGXXC

SEQ ID NO: 7117 - protein, 17 aa, Artificial Sequence
  Synthetically generated peptide
  VARIANT (1)..(17): Xaa = Any Amino Acid
ACELCANXPACTGXXXC

SEQ ID NO: 7118 - protein, 14 aa, Artificial Sequence
  Synthetically generated peptide
  VARIANT (1)..(14): Xaa = Any Amino Acid
ACELCANPXACTGC

SEQ ID NO: 7119 - protein, 15 aa, Artificial Sequence
  Synthetically generated peptide
  VARIANT (1)..(15): Xaa = Any Amino Acid
ACELCANPXXACTGC

SEQ ID NO: 7120 - protein, 16 aa, Artificial Sequence
  Synthetically generated peptide
  VARIANT (1)..(16): Xaa = Any Amino Acid
ACELCANPXXXACTGC

SEQ ID NO: 7121 - protein, 17 aa, Artificial Sequence
  Synthetically generated peptide
  VARIANT (1)..(17): Xaa = Any Amino Acid
ACELCANPXXXXACTGC

SEQ ID NO: 7122 - protein, 17 aa, Artificial Sequence
  Synthetically generated peptide
  VARIANT (1)..(17): Xaa = Any Amino Acid
ACELCANPXXXAXCTGC

SEQ ID NO: 7123 - protein, 17 aa, Artificial Sequence
  Synthetically generated peptide
  VARIANT (1)..(17): Xaa = Any Amino Acid
ACELCANPXXXACXTGC

SEQ ID NO: 7124 - protein, 17 aa, Artificial Sequence
  Synthetically generated peptide
  VARIANT (1)..(17): Xaa = Any Amino Acid
ACELCANPXXXACTXGC

SEQ ID NO: 7125 - protein, 17 aa, Artificial Sequence
  Synthetically generated peptide
  VARIANT (1)..(17): Xaa = Any Amino Acid
ACELCANPXXXACTGXC

SEQ ID NO: 7126 - protein, 16 aa, Artificial Sequence
  Synthetically generated peptide
  VARIANT (1)..(16): Xaa = Any Amino Acid
ACELCANPXXAXCTGC

SEQ ID NO: 7127 - protein, 17 aa, Artificial Sequence
  Synthetically generated peptide
  VARIANT (1)..(17): Xaa = Any Amino Acid
ACELCANPXXAXXCTGC

SEQ ID NO: 7128 - protein, 17 aa, Artificial Sequence
  Synthetically generated peptide
  VARIANT (1)..(17): Xaa = Any Amino Acid
ACELCANPXXAXCXTGC

SEQ ID NO: 7129 - protein, 17 aa, Artificial Sequence
  Synthetically generated peptide
  VARIANT (1)..(17): Xaa = Any Amino Acid
ACELCANPXXAXCTXGC

SEQ ID NO: 7130 - protein, 17 aa, Artificial Sequence
  Synthetically generated peptide
  VARIANT (1)..(17): Xaa = Any Amino Acid
ACELCANPXXAXCTGXC

SEQ ID NO: 7131 - protein, 16 aa, Artificial Sequence
  Synthetically generated peptide
  VARIANT (1)..(16): Xaa = Any Amino Acid
ACELCANPXXACXTGC

SEQ ID NO: 7132 - protein, 17 aa, Artificial Sequence
  Synthetically generated peptide
  VARIANT (1)..(17): Xaa = Any Amino Acid
ACELCANPXXACXXTGC

SEQ ID NO: 7133 - protein, 17 aa, Artificial Sequence
  Synthetically generated peptide
  VARIANT (1)..(17): Xaa = Any Amino Acid
ACELCANPXXACXTXGC

SEQ ID NO: 7134 - protein, 17 aa, Artificial Sequence
  Synthetically generated peptide
  VARIANT (1)..(17): Xaa = Any Amino Acid
ACELCANPXXACXTGXC

SEQ ID NO: 7135 - protein, 16 aa, Artificial Sequence
  Synthetically generated peptide
  VARIANT (1)..(16): Xaa = Any Amino Acid
ACELCANPXXACTXGC

SEQ ID NO: 7136 - protein, 17 aa, Artificial Sequence
  Synthetically generated peptide
  VARIANT (1)..(17): Xaa = Any Amino Acid
ACELCANPXXACTXXGC

SEQ ID NO: 7137 - protein, 17 aa, Artificial Sequence
  Synthetically generated peptide
  VARIANT (1)..(17): Xaa = Any Amino Acid
ACELCANPXXACTXGXC

SEQ ID NO: 7138 - protein, 16 aa, Artificial Sequence
  Synthetically generated peptide
  VARIANT (1)..(16): Xaa = Any Amino Acid
ACELCANPXXACTGXC

SEQ ID NO: 7139 - protein, 17 aa, Artificial Sequence
  Synthetically generated peptide
  VARIANT (1)..(17): Xaa = Any Amino Acid
ACELCANPXXACTGXXC

SEQ ID NO: 7140 - protein, 15 aa, Artificial Sequence
  Synthetically generated peptide
  VARIANT (1)..(15): Xaa = Any Amino Acid
ACELCANPXAXCTGC

SEQ ID NO: 7141 - protein, 16 aa, Artificial Sequence
  Synthetically generated peptide
  VARIANT (1)..(16): Xaa = Any Amino Acid
ACELCANPXAXXCTGC

SEQ ID NO: 7142 - protein, 17 aa, Artificial Sequence
  Synthetically generated peptide
  VARIANT (1)..(17): Xaa = Any Amino Acid
ACELCANPXAXXXCTGC

SEQ ID NO: 7143 - protein, 17 aa, Artificial Sequence
  Synthetically generated peptide
  VARIANT (1)..(17): Xaa = Any Amino Acid
ACELCANPXAXXCXTGC

SEQ ID NO: 7144 - protein, 17 aa, Artificial Sequence
  Synthetically generated peptide
  VARIANT (1)..(17): Xaa = Any Amino Acid
ACELCANPXAXXCTXGC

SEQ ID NO: 7145 - protein, 17 aa, Artificial Sequence
  Synthetically generated peptide
  VARIANT (1)..(17): Xaa = Any Amino Acid
ACELCANPXAXXCTGXC

SEQ ID NO: 7146 - protein, 16 aa, Artificial Sequence
  Synthetically generated peptide
  VARIANT (1)..(16): Xaa = Any Amino Acid
ACELCANPXAXCXTGC

SEQ ID NO: 7147 - protein, 17 aa, Artificial Sequence
  Synthetically generated peptide
  VARIANT (1)..(17): Xaa = Any Amino Acid
ACELCANPXAXCXXTGC

SEQ ID NO: 7148 - protein, 17 aa, Artificial Sequence
  Synthetically generated peptide
  VARIANT (1)..(17): Xaa = Any Amino Acid
ACELCANPXAXCXTXGC

SEQ ID NO: 7149 - protein, 17 aa, Artificial Sequence
  Synthetically generated peptide
  VARIANT (1)..(17): Xaa = Any Amino Acid
ACELCANPXAXCXTGXC

SEQ ID NO: 7150 - protein, 16 aa, Artificial Sequence
  Synthetically generated peptide
  VARIANT (1)..(16): Xaa = Any Amino Acid
ACELCANPXAXCTXGC

SEQ ID NO: 7151 - protein, 17 aa, Artificial Sequence
  Synthetically generated peptide
  VARIANT (1)..(17): Xaa = Any Amino Acid
ACELCANPXAXCTXXGC

SEQ ID NO: 7152 - protein, 17 aa, Artificial Sequence
  Synthetically generated peptide
  VARIANT (1)..(17): Xaa = Any Amino Acid
ACELCANPXAXCTXGXC

SEQ ID NO: 7153 - protein, 16 aa, Artificial Sequence
  Synthetically generated peptide
  VARIANT (1)..(16): Xaa = Any Amino Acid
ACELCANPXAXCTGXC

SEQ ID NO: 7154 - protein, 17 aa, Artificial Sequence
  Synthetically generated peptide
  VARIANT (1)..(17): Xaa = Any Amino Acid
ACELCANPXAXCTGXXC

SEQ ID NO: 7155 - protein, 15 aa, Artificial Sequence
  Synthetically generated peptide
  VARIANT (1)..(15): Xaa = Any Amino Acid
ACELCANPXACXTGC

SEQ ID NO: 7156 - protein, 16 aa, Artificial Sequence
  Synthetically generated peptide
  VARIANT (1)..(16): Xaa = Any Amino Acid
ACELCANPXACXXTGC

SEQ ID NO: 7157 - protein, 17 aa, Artificial Sequence
  Synthetically generated peptide
  VARIANT (1)..(17): Xaa = Any Amino Acid
ACELCANPXACXXXTGC

SEQ ID NO: 7158 - protein, 17 aa, Artificial Sequence
  Synthetically generated peptide
  VARIANT (1)..(17): Xaa = Any Amino Acid
ACELCANPXACXXTXGC

SEQ ID NO: 7159 - protein, 17 aa, Artificial Sequence
  Synthetically generated peptide
  VARIANT (1)..(17): Xaa = Any Amino Acid
ACELCANPXACXXTGXC

SEQ ID NO: 7160 - protein, 16 aa, Artificial Sequence
  Synthetically generated peptide
  VARIANT (1)..(16): Xaa = Any Amino Acid
ACELCANPXACXTXGC

SEQ ID NO: 7161 - protein, 17 aa, Artificial Sequence
  Synthetically generated peptide
  VARIANT (1)..(17): Xaa = Any Amino Acid
ACELCANPXACXTXXGC

SEQ ID NO: 7162 - protein, 17 aa, Artificial Sequence
  Synthetically generated peptide
  VARIANT (1)..(17): Xaa = Any Amino Acid
ACELCANPXACXTXGXC

SEQ ID NO: 7163 - protein, 16 aa, Artificial Sequence
  Synthetically generated peptide
  VARIANT (1)..(16): Xaa = Any Amino Acid
ACELCANPXACXTGXC

SEQ ID NO: 7164 - protein, 17 aa, Artificial Sequence
  Synthetically generated peptide
  VARIANT (1)..(17): Xaa = Any Amino Acid
ACELCANPXACXTGXXC

SEQ ID NO: 7165 - protein, 15 aa, Artificial Sequence
  Synthetically generated peptide
  VARIANT (1)..(15): Xaa = Any Amino Acid
ACELCANPXACTXGC

SEQ ID NO: 7166 - protein, 16 aa, Artificial Sequence
  Synthetically generated peptide
  VARIANT (1)..(16): Xaa = Any Amino Acid
ACELCANPXACTXXGC

SEQ ID NO: 7167 - protein, 17 aa, Artificial Sequence
  Synthetically generated peptide
  VARIANT (1)..(17): Xaa = Any Amino Acid
ACELCANPXACTXXXGC

SEQ ID NO: 7168 - protein, 17 aa, Artificial Sequence
  Synthetically generated peptide
  VARIANT (1)..(17): Xaa = Any Amino Acid
ACELCANPXACTXXGXC

SEQ ID NO: 7169 - protein, 16 aa, Artificial Sequence
  Synthetically generated peptide
  VARIANT (1)..(16): Xaa = Any Amino Acid
ACELCANPXACTXGXC

SEQ ID NO: 7170 - protein, 17 aa, Artificial Sequence
  Synthetically generated peptide
  VARIANT (1)..(17): Xaa = Any Amino Acid
ACELCANPXACTXGXXC

SEQ ID NO: 7171 - protein, 15 aa, Artificial Sequence
  Synthetically generated peptide
  VARIANT (1)..(15): Xaa = Any Amino Acid
ACELCANPXACTGXC

SEQ ID NO: 7172 - protein, 16 aa, Artificial Sequence
  Synthetically generated peptide
  VARIANT (1)..(16): Xaa = Any Amino Acid
ACELCANPXACTGXXC

SEQ ID NO: 7173 - protein, 17 aa, Artificial Sequence
  Synthetically generated peptide
  VARIANT (1)..(17): Xaa = Any Amino Acid
ACELCANPXACTGXXXC

SEQ ID NO: 7174 - protein, 14 aa, Artificial Sequence
  Synthetically generated peptide
  VARIANT (1)..(14): Xaa = Any Amino Acid
ACELCANPAXCTGC

SEQ ID NO: 7175 - protein, 15 aa, Artificial Sequence
  Synthetically generated peptide
  VARIANT (1)..(15): Xaa = Any Amino Acid
ACELCANPAXXCTGC

SEQ ID NO: 7176 - protein, 16 aa, Artificial Sequence
  Synthetically generated peptide
  VARIANT (1)..(16): Xaa = Any Amino Acid
ACELCANPAXXXCTGC

SEQ ID NO: 7177 - protein, 17 aa, Artificial Sequence
  Synthetically generated peptide
  VARIANT (1)..(17): Xaa = Any Amino Acid
ACELCANPAXXXXCTGC

SEQ ID NO: 7178 - protein, 17 aa, Artificial Sequence
  Synthetically generated peptide
  VARIANT (1)..(17): Xaa = Any Amino Acid
ACELCANPAXXXCXTGC

SEQ ID NO: 7179 - protein, 17 aa, Artificial Sequence
  Synthetically generated peptide
  VARIANT (1)..(17): Xaa = Any Amino Acid
ACELCANPAXXXCTXGC

SEQ ID NO: 7180 - protein, 17 aa, Artificial Sequence
  Synthetically generated peptide
  VARIANT (1)..(17): Xaa = Any Amino Acid
ACELCANPAXXXCTGXC

SEQ ID NO: 7181 - protein, 16 aa, Artificial Sequence
  Synthetically generated peptide
  VARIANT (1)..(16): Xaa = Any Amino Acid
ACELCANPAXXCXTGC

SEQ ID NO: 7182 - protein, 17 aa, Artificial Sequence
  Synthetically generated peptide
  VARIANT (1)..(17): Xaa = Any Amino Acid
ACELCANPAXXCXXTGC

SEQ ID NO: 7183 - protein, 17 aa, Artificial Sequence
  Synthetically generated peptide
  VARIANT (1)..(17): Xaa = Any Amino Acid
ACELCANPAXXCXTXGC

SEQ ID NO: 7184 - protein, 17 aa, Artificial Sequence
  Synthetically generated peptide
  VARIANT (1)..(17): Xaa = Any Amino Acid
ACELCANPAXXCXTGXC

SEQ ID NO: 7185 - protein, 16 aa, Artificial Sequence
  Synthetically generated peptide
  VARIANT (1)..(16): Xaa = Any Amino Acid
ACELCANPAXXCTXGC

SEQ ID NO: 7186 - protein, 17 aa, Artificial Sequence
  Synthetically generated peptide
  VARIANT (1)..(17): Xaa = Any Amino Acid
ACELCANPAXXCTXXGC

SEQ ID NO: 7187 - protein, 17 aa, Artificial Sequence
  Synthetically generated peptide
  VARIANT (1)..(17): Xaa = Any Amino Acid
ACELCANPAXXCTXGXC

SEQ ID NO: 7188 - protein, 16 aa, Artificial Sequence
  Synthetically generated peptide
  VARIANT (1)..(16): Xaa = Any Amino Acid
ACELCANPAXXCTGXC

SEQ ID NO: 7189 - protein, 17 aa, Artificial Sequence
  Synthetically generated peptide
  VARIANT (1)..(17): Xaa = Any Amino Acid
ACELCANPAXXCTGXXC

SEQ ID NO: 7190 - protein, 15 aa, Artificial Sequence
  Synthetically generated peptide
  VARIANT (1)..(15): Xaa = Any Amino Acid
ACELCANPAXCXTGC

SEQ ID NO: 7191 - protein, 16 aa, Artificial Sequence
  Synthetically generated peptide
  VARIANT (1)..(16): Xaa = Any Amino Acid
ACELCANPAXCXXTGC

SEQ ID NO: 7192 - protein, 17 aa, Artificial Sequence
  Synthetically generated peptide
  VARIANT (1)..(17): Xaa = Any Amino Acid
ACELCANPAXCXXXTGC

SEQ ID NO: 7193 - protein, 17 aa, Artificial Sequence
  Synthetically generated peptide
  VARIANT (1)..(17): Xaa = Any Amino Acid
ACELCANPAXCXXTXGC

SEQ ID NO: 7194 - protein, 17 aa, Artificial Sequence
  Synthetically generated peptide
  VARIANT (1)..(17): Xaa = Any Amino Acid
ACELCANPAXCXXTGXC

SEQ ID NO: 7195 - protein, 16 aa, Artificial Sequence
  Synthetically generated peptide
  VARIANT (1)..(16): Xaa = Any Amino Acid
ACELCANPAXCXTXGC

SEQ ID NO: 7196 - protein, 17 aa, Artificial Sequence
  Synthetically generated peptide
  VARIANT (1)..(17): Xaa = Any Amino Acid
ACELCANPAXCXTXXGC

SEQ ID NO: 7197 - protein, 17 aa, Artificial Sequence
  Synthetically generated peptide
  VARIANT (1)..(17): Xaa = Any Amino Acid
ACELCANPAXCXTXGXC

SEQ ID NO: 7198 - protein, 16 aa, Artificial Sequence
  Synthetically generated peptide
  VARIANT (1)..(16): Xaa = Any Amino Acid
ACELCANPAXCXTGXC

SEQ ID NO: 7199 - protein, 17 aa, Artificial Sequence
  Synthetically generated peptide
  VARIANT (1)..(17): Xaa = Any Amino Acid
ACELCANPAXCXTGXXC

SEQ ID NO: 7200 - protein, 15 aa, Artificial Sequence
  Synthetically generated peptide
  VARIANT (1)..(15): Xaa = Any Amino Acid
ACELCANPAXCTXGC

SEQ ID NO: 7201 - protein, 16 aa, Artificial Sequence
  Synthetically generated peptide
  VARIANT (1)..(16): Xaa = Any Amino Acid
ACELCANPAXCTXXGC

SEQ ID NO: 7202 - protein, 17 aa, Artificial Sequence
  Synthetically generated peptide
  VARIANT (1)..(17): Xaa = Any Amino Acid
ACELCANPAXCTXXXGC

SEQ ID NO: 7203 - protein, 17 aa, Artificial Sequence
  Synthetically generated peptide
  VARIANT (1)..(17): Xaa = Any Amino Acid
ACELCANPAXCTXXGXC

SEQ ID NO: 7204 - protein, 16 aa, Artificial Sequence
  Synthetically generated peptide
  VARIANT (1)..(16): Xaa = Any Amino Acid
ACELCANPAXCTXGXC

SEQ ID NO: 7205 - protein, 17 aa, Artificial Sequence
  Synthetically generated peptide
  VARIANT (1)..(17): Xaa = Any Amino Acid
ACELCANPAXCTXGXXC

SEQ ID NO: 7206 - protein, 15 aa, Artificial Sequence
  Synthetically generated peptide
  VARIANT (1)..(15): Xaa = Any Amino Acid
ACELCANPAXCTGXC

SEQ ID NO: 7207 - protein, 16 aa, Artificial Sequence
  Synthetically generated peptide
  VARIANT (1)..(16): Xaa = Any Amino Acid
ACELCANPAXCTGXXC

SEQ ID NO: 7208 - protein, 17 aa, Artificial Sequence
  Synthetically generated peptide
  VARIANT (1)..(17): Xaa = Any Amino Acid
ACELCANPAXCTGXXXC

SEQ ID NO: 7209 - protein, 14 aa, Artificial Sequence
  Synthetically generated peptide
  VARIANT (1)..(14): Xaa = Any Amino Acid
ACELCANPACXTGC

SEQ ID NO: 7210 - protein, 15 aa, Artificial Sequence
  Synthetically generated peptide
  VARIANT (1)..(15): Xaa = Any Amino Acid
ACELCANPACXXTGC

SEQ ID NO: 7211 - protein, 16 aa, Artificial Sequence
  Synthetically generated peptide
  VARIANT (1)..(16): Xaa = Any Amino Acid
ACELCANPACXXXTGC

SEQ ID NO: 7212 - protein, 17 aa, Artificial Sequence
  Synthetically generated peptide
  VARIANT (1)..(17): Xaa = Any Amino Acid
ACELCANPACXXXXTGC

SEQ ID NO: 7213 - protein, 17 aa, Artificial Sequence
  Synthetically generated peptide
  VARIANT (1)..(17): Xaa = Any Amino Acid
ACELCANPACXXXTXGC

SEQ ID NO: 7214 - protein, 17 aa, Artificial Sequence
  Synthetically generated peptide
  VARIANT (1)..(17): Xaa = Any Amino Acid
ACELCANPACXXXTGXC

SEQ ID NO: 7215 - protein, 16 aa, Artificial Sequence
  Synthetically generated peptide
  VARIANT (1)..(16): Xaa = Any Amino Acid
ACELCANPACXXTXGC

SEQ ID NO: 7216 - protein, 17 aa, Artificial Sequence
  Synthetically generated peptide
  VARIANT (1)..(17): Xaa = Any Amino Acid
ACELCANPACXXTXXGC

SEQ ID NO: 7217 - protein, 17 aa, Artificial Sequence
  Synthetically generated peptide
  VARIANT (1)..(17): Xaa = Any Amino Acid
ACELCANPACXXTXGXC

SEQ ID NO: 7218 - protein, 16 aa, Artificial Sequence
  Synthetically generated peptide
  VARIANT (1)..(16): Xaa = Any Amino Acid
ACELCANPACXXTGXC

SEQ ID NO: 7219 - protein, 17 aa, Artificial Sequence
  Synthetically generated peptide
  VARIANT (1)..(17): Xaa = Any Amino Acid
ACELCANPACXXTGXXC

SEQ ID NO: 7220 - protein, 15 aa, Artificial Sequence
  Synthetically generated peptide
  VARIANT (1)..(15): Xaa = Any Amino Acid
ACELCANPACXTXGC

SEQ ID NO: 7221 - protein, 16 aa, Artificial Sequence
  Synthetically generated peptide
  VARIANT (1)..(16): Xaa = Any Amino Acid
ACELCANPACXTXXGC

SEQ ID NO: 7222 - protein, 17 aa, Artificial Sequence
  Synthetically generated peptide
  VARIANT (1)..(17): Xaa = Any Amino Acid
ACELCANPACXTXXXGC

SEQ ID NO: 7223 - protein, 17 aa, Artificial Sequence
  Synthetically generated peptide
  VARIANT (1)..(17): Xaa = Any Amino Acid
ACELCANPACXTXXGXC

SEQ ID NO: 7224 - protein, 16 aa, Artificial Sequence
  Synthetically generated peptide
  VARIANT (1)..(16): Xaa = Any Amino Acid
ACELCANPACXTXGXC

SEQ ID NO: 7225 - protein, 17 aa, Artificial Sequence
  Synthetically generated peptide
  VARIANT (1)..(17): Xaa = Any Amino Acid
ACELCANPACXTXGXXC

SEQ ID NO: 7226 - protein, 15 aa, Artificial Sequence
  Synthetically generated peptide
  VARIANT (1)..(15): Xaa = Any Amino Acid
ACELCANPACXTGXC

SEQ ID NO: 7227 - protein, 16 aa, Artificial Sequence
  Synthetically generated peptide
  VARIANT (1)..(16): Xaa = Any Amino Acid
ACELCANPACXTGXXC

SEQ ID NO: 7228 - protein, 17 aa, Artificial Sequence
  Synthetically generated peptide
  VARIANT (1)..(17): Xaa = Any Amino Acid
ACELCANPACXTGXXXC

SEQ ID NO: 7229 - protein, 14 aa, Artificial Sequence
  Synthetically generated peptide
  VARIANT (1)..(14): Xaa = Any Amino Acid
ACELCANPACTXGC

SEQ ID NO: 7230 - protein, 15 aa, Artificial Sequence
  Synthetically generated peptide
  VARIANT (1)..(15): Xaa = Any Amino Acid
ACELCANPACTXXGC

SEQ ID NO: 7231 - protein, 16 aa, Artificial Sequence
  Synthetically generated peptide
  VARIANT (1)..(16): Xaa = Any Amino Acid
ACELCANPACTXXXGC

SEQ ID NO: 7232 - protein, 17 aa, Artificial Sequence
  Synthetically generated peptide
  VARIANT (1)..(17): Xaa = Any Amino Acid
ACELCANPACTXXXXGC

SEQ ID NO: 7233 - protein, 17 aa, Artificial Sequence
  Synthetically generated peptide
  VARIANT (1)..(17): Xaa = Any Amino Acid
ACELCANPACTXXXGXC

SEQ ID NO: 7234 - protein, 16 aa, Artificial Sequence
  Synthetically generated peptide
  VARIANT (1)..(16): Xaa = Any Amino Acid
ACELCANPACTXXGXC

SEQ ID NO: 7235 - protein, 17 aa, Artificial Sequence
  Synthetically generated peptide
  VARIANT (1)..(17): Xaa = Any Amino Acid
ACELCANPACTXXGXXC

SEQ ID NO: 7236 - protein, 15 aa, Artificial Sequence
  Synthetically generated peptide
  VARIANT (1)..(15): Xaa = Any Amino Acid
ACELCANPACTXGXC

SEQ ID NO: 7237 - protein, 16 aa, Artificial Sequence
  Synthetically generated peptide
  VARIANT (1)..(16): Xaa = Any Amino Acid
ACELCANPACTXGXXC

SEQ ID NO: 7238 - protein, 17 aa, Artificial Sequence
  Synthetically generated peptide
  VARIANT (1)..(17): Xaa = Any Amino Acid
ACELCANPACTXGXXXC

SEQ ID NO: 7239 - protein, 14 aa, Artificial Sequence
  Synthetically generated peptide
  VARIANT (1)..(14): Xaa = Any Amino Acid
ACELCANPACTGXC

SEQ ID NO: 7240 - protein, 15 aa, Artificial Sequence
  Synthetically generated peptide
  VARIANT (1)..(15): Xaa = Any Amino Acid
ACELCANPACTGXXC

SEQ ID NO: 7241 - protein, 16 aa, Artificial Sequence
  Synthetically generated peptide
  VARIANT (1)..(16): Xaa = Any Amino Acid
ACELCANPACTGXXXC

SEQ ID NO: 7242 - protein, 17 aa, Artificial Sequence
  Synthetically generated peptide
  VARIANT (1)..(17): Xaa = Any Amino Acid
ACELCANPACTGXXXXC

SEQ ID NO: 7243 - protein, 14 aa, Artificial Sequence
  Synthetically generated peptide
  VARIANT (1)..(14): Xaa = Any Amino Acid
CCXELACNPACTGA

SEQ ID NO: 7244 - protein, 15 aa, Artificial Sequence
  Synthetically generated peptide
  VARIANT (1)..(15): Xaa = Any Amino Acid
CCXXELACNPACTGA

SEQ ID NO: 7245 - protein, 16 aa, Artificial Sequence
  Synthetically generated peptide
  VARIANT (1)..(16): Xaa = Any Amino Acid
CCXXXELACNPACTGA

SEQ ID NO: 7246 - protein, 17 aa, Artificial Sequence
  Synthetically generated peptide
  VARIANT (1)..(17): Xaa = Any Amino Acid
CCXXXXELACNPACTGA

SEQ ID NO: 7247 - protein, 17 aa, Artificial Sequence
  Synthetically generated peptide
  VARIANT (1)..(17): Xaa = Any Amino Acid
CCXXXEXLACNPACTGA

SEQ ID NO: 7248 - protein, 17 aa, Artificial Sequence
  Synthetically generated peptide
  VARIANT (1)..(17): Xaa = Any Amino Acid
CCXXXELXACNPACTGA

SEQ ID NO: 7249 - protein, 17 aa, Artificial Sequence
  Synthetically generated peptide
  VARIANT (1)..(17): Xaa = Any Amino Acid
CCXXXELACXNPACTGA

SEQ ID NO: 7250 - protein, 17 aa, Artificial Sequence
  Synthetically generated peptide
  VARIANT (1)..(17): Xaa = Any Amino Acid
CCXXXELACNXPACTGA

SEQ ID NO: 7251 - protein, 17 aa, Artificial Sequence
  Synthetically generated peptide
  VARIANT (1)..(17): Xaa = Any Amino Acid
CCXXXELACNPXACTGA

SEQ ID NO: 7252 - protein, 17 aa, Artificial Sequence
  Synthetically generated peptide
  VARIANT (1)..(17): Xaa = Any Amino Acid
CCXXXELACNPAXCTGA

SEQ ID NO: 7253 - protein, 17 aa, Artificial Sequence
  Synthetically generated peptide
  VARIANT (1)..(17): Xaa = Any Amino Acid
CCXXXELACNPACXTGA

SEQ ID NO: 7254 - protein, 17 aa, Artificial Sequence
  Synthetically generated peptide
  VARIANT (1)..(17): Xaa = Any Amino Acid
CCXXXELACNPACTXGA

SEQ ID NO: 7255 - protein, 17 aa, Artificial Sequence
  Synthetically generated peptide
  VARIANT (1)..(17): Xaa = Any Amino Acid
CCXXXELACNPACTGXA

SEQ ID NO: 7256 - protein, 16 aa, Artificial Sequence
  Synthetically generated peptide
  VARIANT (1)..(16): Xaa = Any Amino Acid
CCXXEXLACNPACTGA

SEQ ID NO: 7257 - protein, 17 aa, Artificial Sequence
  Synthetically generated peptide
  VARIANT (1)..(17): Xaa = Any Amino Acid
CCXXEXXLACNPACTGA

SEQ ID NO: 7258 - protein, 17 aa, Artificial Sequence
  Synthetically generated peptide
  VARIANT (1)..(17): Xaa = Any Amino Acid
CCXXEXLXACNPACTGA

SEQ ID NO: 7259 - protein, 17 aa, Artificial Sequence
  Synthetically generated peptide
  VARIANT (1)..(17): Xaa = Any Amino Acid
CCXXEXLACXNPACTGA

SEQ ID NO: 7260 - protein, 17 aa, Artificial Sequence
  Synthetically generated peptide
  VARIANT (1)..(17): Xaa = Any Amino Acid
CCXXEXLACNXPACTGA

SEQ ID NO: 7261 - protein, 17 aa, Artificial Sequence
  Synthetically generated peptide
  VARIANT (1)..(17): Xaa = Any Amino Acid
CCXXEXLACNPXACTGA

SEQ ID NO: 7262 - protein, 17 aa, Artificial Sequence
  Synthetically generated peptide
  VARIANT (1)..(17): Xaa = Any Amino Acid
CCXXEXLACNPAXCTGA

SEQ ID NO: 7263 - protein, 17 aa, Artificial Sequence
  Synthetically generated peptide
  VARIANT (1)..(17): Xaa = Any Amino Acid
CCXXEXLACNPACXTGA

SEQ ID NO: 7264 - protein, 17 aa, Artificial Sequence
  Synthetically generated peptide
  VARIANT (1)..(17): Xaa = Any Amino Acid
CCXXEXLACNPACTXGA

SEQ ID NO: 7265 - protein, 17 aa, Artificial Sequence
  Synthetically generated peptide
  VARIANT (1)..(17): Xaa = Any Amino Acid
CCXXEXLACNPACTGXA

SEQ ID NO: 7266 - protein, 16 aa, Artificial Sequence
  Synthetically generated peptide
  VARIANT (1)..(16): Xaa = Any Amino Acid
CCXXELXACNPACTGA

SEQ ID NO: 7267 - protein, 17 aa, Artificial Sequence
  Synthetically generated peptide
  VARIANT (1)..(17): Xaa = Any Amino Acid
CCXXELXXACNPACTGA

SEQ ID NO: 7268 - protein, 17 aa, Artificial Sequence
  Synthetically generated peptide
  VARIANT (1)..(17): Xaa = Any Amino Acid
CCXXELXACXNPACTGA

SEQ ID NO: 7269 - protein, 17 aa, Artificial Sequence
  Synthetically generated peptide
  VARIANT (1)..(17): Xaa = Any Amino Acid
CCXXELXACNXPACTGA

SEQ ID NO: 7270 - protein, 17 aa, Artificial Sequence
  Synthetically generated peptide
  VARIANT (1)..(17): Xaa = Any Amino Acid
CCXXELXACNPXACTGA

SEQ ID NO: 7271 - protein, 17 aa, Artificial Sequence
  Synthetically generated peptide
  VARIANT (1)..(17): Xaa = Any Amino Acid
CCXXELXACNPAXCTGA

SEQ ID NO: 7272 - protein, 17 aa, Artificial Sequence
  Synthetically generated peptide
  VARIANT (1)..(17): Xaa = Any Amino Acid
CCXXELXACNPACXTGA

SEQ ID NO: 7273 - protein, 17 aa, Artificial Sequence
  Synthetically generated peptide
  VARIANT (1)..(17): Xaa = Any Amino Acid
CCXXELXACNPACTXGA

SEQ ID NO: 7274 - protein, 17 aa, Artificial Sequence
  Synthetically generated peptide
  VARIANT (1)..(17): Xaa = Any Amino Acid
CCXXELXACNPACTGXA

SEQ ID NO: 7275 - protein, 16 aa, Artificial Sequence
  Synthetically generated peptide
  VARIANT (1)..(16): Xaa = Any Amino Acid
CCXXELACXNPACTGA

SEQ ID NO: 7276 - protein, 17 aa, Artificial Sequence
  Synthetically generated peptide
  VARIANT (1)..(17): Xaa = Any Amino Acid
CCXXELACXXNPACTGA

SEQ ID NO: 7277 - protein, 17 aa, Artificial Sequence
  Synthetically generated peptide
  VARIANT (1)..(17): Xaa = Any Amino Acid
CCXXELACXNXPACTGA

SEQ ID NO: 7278 - protein, 17 aa, Artificial Sequence
  Synthetically generated peptide
  VARIANT (1)..(17): Xaa = Any Amino Acid
CCXXELACXNPXACTGA

SEQ ID NO: 7279 - protein, 17 aa, Artificial Sequence
  Synthetically generated peptide
  VARIANT (1)..(17): Xaa = Any Amino Acid
CCXXELACXNPAXCTGA

SEQ ID NO: 7280 - protein, 17 aa, Artificial Sequence
  Synthetically generated peptide
  VARIANT (1)..(17): Xaa = Any Amino Acid
CCXXELACXNPACXTGA

SEQ ID NO: 7281 - protein, 17 aa, Artificial Sequence
  Synthetically generated peptide
  VARIANT (1)..(17): Xaa = Any Amino Acid
CCXXELACXNPACTXGA

SEQ ID NO: 7282 - protein, 17 aa, Artificial Sequence
  Synthetically generated peptide
  VARIANT (1)..(17): Xaa = Any Amino Acid
CCXXELACXNPACTGXA

SEQ ID NO: 7283 - protein, 16 aa, Artificial Sequence
  Synthetically generated peptide
  VARIANT (1)..(16): Xaa = Any Amino Acid
CCXXELACNXPACTGA

SEQ ID NO: 7284 - protein, 17 aa, Artificial Sequence
  Synthetically generated peptide
  VARIANT (1)..(17): Xaa = Any Amino Acid
CCXXELACNXXPACTGA

SEQ ID NO: 7285 - protein, 17 aa, Artificial Sequence
  Synthetically generated peptide
  VARIANT (1)..(17): Xaa = Any Amino Acid
CCXXELACNXPXACTGA

SEQ ID NO: 7286 - protein, 17 aa, Artificial Sequence
  Synthetically generated peptide
  VARIANT (1)..(17): Xaa = Any Amino Acid
CCXXELACNXPAXCTGA

SEQ ID NO: 7287 - protein, 17 aa, Artificial Sequence
  Synthetically generated peptide
  VARIANT (1)..(17): Xaa = Any Amino Acid
CCXXELACNXPACXTGA

SEQ ID NO: 7288 - protein, 17 aa, Artificial Sequence
  Synthetically generated peptide
  VARIANT (1)..(17): Xaa = Any Amino Acid
CCXXELACNXPACTXGA

SEQ ID NO: 7289 - protein, 17 aa, Artificial Sequence
  Synthetically generated peptide
  VARIANT (1)..(17): Xaa = Any Amino Acid
CCXXELACNXPACTGXA

SEQ ID NO: 7290 - protein, 16 aa, Artificial Sequence
  Synthetically generated peptide
  VARIANT (1)..(16): Xaa = Any Amino Acid
CCXXELACNPXACTGA

SEQ ID NO: 7291 - protein, 17 aa, Artificial Sequence
  Synthetically generated peptide
  VARIANT (1)..(17): Xaa = Any Amino Acid
CCXXELACNPXXACTGA

SEQ ID NO: 7292 - protein, 17 aa, Artificial Sequence
  Synthetically generated peptide
  VARIANT (1)..(17): Xaa = Any Amino Acid
CCXXELACNPXAXCTGA

SEQ ID NO: 7293 - protein, 17 aa, Artificial Sequence
  Synthetically generated peptide
  VARIANT (1)..(17): Xaa = Any Amino Acid
CCXXELACNPXACXTGA

SEQ ID NO: 7294 - protein, 17 aa, Artificial Sequence
  Synthetically generated peptide
  VARIANT (1)..(17): Xaa = Any Amino Acid
CCXXELACNPXACTXGA

SEQ ID NO: 7295 - protein, 17 aa, Artificial Sequence
  Synthetically generated peptide
  VARIANT (1)..(17): Xaa = Any Amino Acid
CCXXELACNPXACTGXA

SEQ ID NO: 7296 - protein, 16 aa, Artificial Sequence
  Synthetically generated peptide
  VARIANT (1)..(16): Xaa = Any Amino Acid
CCXXELACNPAXCTGA

SEQ ID NO: 7297 - protein, 17 aa, Artificial Sequence
  Synthetically generated peptide
  VARIANT (1)..(17): Xaa = Any Amino Acid
CCXXELACNPAXXCTGA

SEQ ID NO: 7298 - protein, 17 aa, Artificial Sequence
  Synthetically generated peptide
  VARIANT (1)..(17): Xaa = Any Amino Acid
CCXXELACNPAXCXTGA

SEQ ID NO: 7299 - protein, 17 aa, Artificial Sequence
  Synthetically generated peptide
  VARIANT (1)..(17): Xaa = Any Amino Acid
CCXXELACNPAXCTXGA

SEQ ID NO: 7300 - protein, 17 aa, Artificial Sequence
  Synthetically generated peptide
  VARIANT (1)..(17): Xaa = Any Amino Acid
CCXXELACNPAXCTGXA

SEQ ID NO: 7301 - protein, 16 aa, Artificial Sequence
  Synthetically generated peptide
  VARIANT (1)..(16): Xaa = Any Amino Acid
CCXXELACNPACXTGA

SEQ ID NO: 7302 - protein, 17 aa, Artificial Sequence
  Synthetically generated peptide
  VARIANT (1)..(17): Xaa = Any Amino Acid
CCXXELACNPACXXTGA

SEQ ID NO: 7303 - protein, 17 aa, Artificial Sequence
  Synthetically generated peptide
  VARIANT (1)..(17): Xaa = Any Amino Acid
CCXXELACNPACXTXGA

SEQ ID NO: 7304 - protein, 17 aa, Artificial Sequence
  Synthetically generated peptide
  VARIANT (1)..(17): Xaa = Any Amino Acid
CCXXELACNPACXTGXA

SEQ ID NO: 7305 - protein, 16 aa, Artificial Sequence
  Synthetically generated peptide
  VARIANT (1)..(16): Xaa = Any Amino Acid
CCXXELACNPACTXGA

SEQ ID NO: 7306 - protein, 17 aa, Artificial Sequence
  Synthetically generated peptide
  VARIANT (1)..(17): Xaa = Any Amino Acid
CCXXELACNPACTXXGA

SEQ ID NO: 7307 - protein, 17 aa, Artificial Sequence
  Synthetically generated peptide
  VARIANT (1)..(17): Xaa = Any Amino Acid
CCXXELACNPACTXGXA

SEQ ID NO: 7308 - protein, 16 aa, Artificial Sequence
  Synthetically generated peptide
  VARIANT (1)..(16): Xaa = Any Amino Acid
CCXXELACNPACTGXA

SEQ ID NO: 7309 - protein, 17 aa, Artificial Sequence
  Synthetically generated peptide
  VARIANT (1)..(17): Xaa = Any Amino Acid
CCXXELACNPACTGXXA

SEQ ID NO: 7310 - protein, 15 aa, Artificial Sequence
  Synthetically generated peptide
  VARIANT (1)..(15): Xaa = Any Amino Acid
CCXEXLACNPACTGA

SEQ ID NO: 7311 - protein, 16 aa, Artificial Sequence
  Synthetically generated peptide
  VARIANT (1)..(16): Xaa = Any Amino Acid
CCXEXXLACNPACTGA

SEQ ID NO: 7312 - protein, 17 aa, Artificial Sequence
  Synthetically generated peptide
  VARIANT (1)..(17): Xaa = Any Amino Acid
CCXEXXXLACNPACTGA

SEQ ID NO: 7313 - protein, 17 aa, Artificial Sequence
  Synthetically generated peptide
  VARIANT (1)..(17): Xaa = Any Amino Acid
CCXEXXLXACNPACTGA

SEQ ID NO: 7314 - protein, 17 aa, Artificial Sequence
  Synthetically generated peptide
  VARIANT (1)..(17): Xaa = Any Amino Acid
CCXEXXLACXNPACTGA

SEQ ID NO: 7315 - protein, 17 aa, Artificial Sequence
  Synthetically generated peptide
  VARIANT (1)..(17): Xaa = Any Amino Acid
CCXEXXLACNXPACTGA

SEQ ID NO: 7316 - protein, 17 aa, Artificial Sequence
  Synthetically generated peptide
  VARIANT (1)..(17): Xaa = Any Amino Acid
CCXEXXLACNPXACTGA

SEQ ID NO: 7317 - protein, 17 aa, Artificial Sequence
  Synthetically generated peptide
  VARIANT (1)..(17): Xaa = Any Amino Acid
CCXEXXLACNPAXCTGA

SEQ ID NO: 7318 - protein, 17 aa, Artificial Sequence
  Synthetically generated peptide
  VARIANT (1)..(17): Xaa = Any Amino Acid
CCXEXXLACNPACXTGA

SEQ ID NO: 7319 - protein, 17 aa, Artificial Sequence
  Synthetically generated peptide
  VARIANT (1)..(17): Xaa = Any Amino Acid
CCXEXXLACNPACTXGA

SEQ ID NO: 7320 - protein, 17 aa, Artificial Sequence
  Synthetically generated peptide
  VARIANT (1)..(17): Xaa = Any Amino Acid
CCXEXXLACNPACTGXA

SEQ ID NO: 7321 - protein, 16 aa, Artificial Sequence
  Synthetically generated peptide
  VARIANT (1)..(16): Xaa = Any Amino Acid
CCXEXLXACNPACTGA

SEQ ID NO: 7322 - protein, 17 aa, Artificial Sequence
  Synthetically generated peptide
  VARIANT (1)..(17): Xaa = Any Amino Acid
CCXEXLXXACNPACTGA

SEQ ID NO: 7323 - protein, 17 aa, Artificial Sequence
  Synthetically generated peptide
  VARIANT (1)..(17): Xaa = Any Amino Acid
CCXEXLXACXNPACTGA

SEQ ID NO: 7324 - protein, 17 aa, Artificial Sequence
  Synthetically generated peptide
  VARIANT (1)..(17): Xaa = Any Amino Acid
CCXEXLXACNXPACTGA

SEQ ID NO: 7325 - protein, 17 aa, Artificial Sequence
  Synthetically generated peptide
  VARIANT (1)..(17): Xaa = Any Amino Acid
CCXEXLXACNPXACTGA

SEQ ID NO: 7326 - protein, 17 aa, Artificial Sequence
  Synthetically generated peptide
  VARIANT (1)..(17): Xaa = Any Amino Acid
CCXEXLXACNPAXCTGA

SEQ ID NO: 7327 - protein, 17 aa, Artificial Sequence
  Synthetically generated peptide
  VARIANT (1)..(17): Xaa = Any Amino Acid
CCXEXLXACNPACXTGA

SEQ ID NO: 7328 - protein, 17 aa, Artificial Sequence
  Synthetically generated peptide
  VARIANT (1)..(17): Xaa = Any Amino Acid
CCXEXLXACNPACTXGA

SEQ ID NO: 7329 - protein, 17 aa, Artificial Sequence
  Synthetically generated peptide
  VARIANT (1)..(17): Xaa = Any Amino Acid
CCXEXLXACNPACTGXA

SEQ ID NO: 7330 - protein, 16 aa, Artificial Sequence
  Synthetically generated peptide
  VARIANT (1)..(16): Xaa = Any Amino Acid
CCXEXLACXNPACTGA

SEQ ID NO: 7331 - protein, 17 aa, Artificial Sequence
  Synthetically generated peptide
  VARIANT (1)..(17): Xaa = Any Amino Acid
CCXEXLACXXNPACTGA

SEQ ID NO: 7332 - protein, 17 aa, Artificial Sequence
  Synthetically generated peptide
  VARIANT (1)..(17): Xaa = Any Amino Acid
CCXEXLACXNXPACTGA

SEQ ID NO: 7333 - protein, 17 aa, Artificial Sequence
  Synthetically generated peptide
  VARIANT (1)..(17): Xaa = Any Amino Acid
CCXEXLACXNPXACTGA

SEQ ID NO: 7334 - protein, 17 aa, Artificial Sequence
  Synthetically generated peptide
  VARIANT (1)..(17): Xaa = Any Amino Acid
CCXEXLACXNPAXCTGA

SEQ ID NO: 7335 - protein, 17 aa, Artificial Sequence
  Synthetically generated peptide
  VARIANT (1)..(17): Xaa = Any Amino Acid
CCXEXLACXNPACXTGA

SEQ ID NO: 7336 - protein, 17 aa, Artificial Sequence
  Synthetically generated peptide
  VARIANT (1)..(17): Xaa = Any Amino Acid
CCXEXLACXNPACTXGA

SEQ ID NO: 7337 - protein, 17 aa, Artificial Sequence
  Synthetically generated peptide
  VARIANT (1)..(17): Xaa = Any Amino Acid
CCXEXLACXNPACTGXA

SEQ ID NO: 7338 - protein, 16 aa, Artificial Sequence
  Synthetically generated peptide
  VARIANT (1)..(16): Xaa = Any Amino Acid
CCXEXLACNXPACTGA

SEQ ID NO: 7339 - protein, 17 aa, Artificial Sequence
  Synthetically generated peptide
  VARIANT (1)..(17): Xaa = Any Amino Acid
CCXEXLACNXXPACTGA

SEQ ID NO: 7340 - protein, 17 aa, Artificial Sequence
  Synthetically generated peptide
  VARIANT (1)..(17): Xaa = Any Amino Acid
CCXEXLACNXPXACTGA

SEQ ID NO: 7341 - protein, 17 aa, Artificial Sequence
  Synthetically generated peptide
  VARIANT (1)..(17): Xaa = Any Amino Acid
CCXEXLACNXPAXCTGA

SEQ ID NO: 7342 - protein, 17 aa, Artificial Sequence
  Synthetically generated peptide
  VARIANT (1)..(17): Xaa = Any Amino Acid
CCXEXLACNXPACXTGA

SEQ ID NO: 7343 - protein, 17 aa, Artificial Sequence
  Synthetically generated peptide
  VARIANT (1)..(17): Xaa = Any Amino Acid
CCXEXLACNXPACTXGA

SEQ ID NO: 7344 - protein, 17 aa, Artificial Sequence
  Synthetically generated peptide
  VARIANT (1)..(17): Xaa = Any Amino Acid
CCXEXLACNXPACTGXA

SEQ ID NO: 7345 - protein, 16 aa, Artificial Sequence
  Synthetically generated peptide
  VARIANT (1)..(16): Xaa = Any Amino Acid
CCXEXLACNPXACTGA

SEQ ID NO: 7346 - protein, 17 aa, Artificial Sequence
  Synthetically generated peptide
  VARIANT (1)..(17): Xaa = Any Amino Acid
CCXEXLACNPXXACTGA

SEQ ID NO: 7347 - protein, 17 aa, Artificial Sequence
  Synthetically generated peptide
  VARIANT (1)..(17): Xaa = Any Amino Acid
CCXEXLACNPXAXCTGA

SEQ ID NO: 7348 - protein, 17 aa, Artificial Sequence
  Synthetically generated peptide
  VARIANT (1)..(17): Xaa = Any Amino Acid
CCXEXLACNPXACXTGA

SEQ ID NO: 7349 - protein, 17 aa, Artificial Sequence
  Synthetically generated peptide
  VARIANT (1)..(17): Xaa = Any Amino Acid
CCXEXLACNPXACTXGA

SEQ ID NO: 7350 - protein, 17 aa, Artificial Sequence
  Synthetically generated peptide
  VARIANT (1)..(17): Xaa = Any Amino Acid
CCXEXLACNPXACTGXA

SEQ ID NO: 7351 - protein, 16 aa, Artificial Sequence
  Synthetically generated peptide
  VARIANT (1)..(16): Xaa = Any Amino Acid
CCXEXLACNPAXCTGA

SEQ ID NO: 7352 - protein, 17 aa, Artificial Sequence
  Synthetically generated peptide
  VARIANT (1)..(17): Xaa = Any Amino Acid
CCXEXLACNPAXXCTGA

SEQ ID NO: 7353 - protein, 17 aa, Artificial Sequence
  Synthetically generated peptide
  VARIANT (1)..(17): Xaa = Any Amino Acid
CCXEXLACNPAXCXTGA

SEQ ID NO: 7354 - protein, 17 aa, Artificial Sequence
  Synthetically generated peptide
  VARIANT (1)..(17): Xaa = Any Amino Acid
CCXEXLACNPAXCTXGA

SEQ ID NO: 7355 - protein, 17 aa, Artificial Sequence
  Synthetically generated peptide
  VARIANT (1)..(17): Xaa = Any Amino Acid
CCXEXLACNPAXCTGXA

SEQ ID NO: 7356 - protein, 16 aa, Artificial Sequence
  Synthetically generated peptide
  VARIANT (1)..(16): Xaa = Any Amino Acid
CCXEXLACNPACXTGA

SEQ ID NO: 7357 - protein, 17 aa, Artificial Sequence
  Synthetically generated peptide
  VARIANT (1)..(17): Xaa = Any Amino Acid
CCXEXLACNPACXXTGA

SEQ ID NO: 7358 - protein, 17 aa, Artificial Sequence
  Synthetically generated peptide
  VARIANT (1)..(17): Xaa = Any Amino Acid
CCXEXLACNPACXTXGA

SEQ ID NO: 7359 - protein, 17 aa, Artificial Sequence
  Synthetically generated peptide
  VARIANT (1)..(17): Xaa = Any Amino Acid
CCXEXLACNPACXTGXA

SEQ ID NO: 7360 - protein, 16 aa, Artificial Sequence
  Synthetically generated peptide
  VARIANT (1)..(16): Xaa = Any Amino Acid
CCXEXLACNPACTXGA

SEQ ID NO: 7361 - protein, 17 aa, Artificial Sequence
  Synthetically generated peptide
  VARIANT (1)..(17): Xaa = Any Amino Acid
CCXEXLACNPACTXXGA

SEQ ID NO: 7362 - protein, 17 aa, Artificial Sequence
  Synthetically generated peptide
  VARIANT (1)..(17): Xaa = Any Amino Acid
CCXEXLACNPACTXGXA

SEQ ID NO: 7363 - protein, 16 aa, Artificial Sequence
  Synthetically generated peptide
  VARIANT (1)..(16): Xaa = Any Amino Acid
CCXEXLACNPACTGXA

SEQ ID NO: 7364 - protein, 17 aa, Artificial Sequence
  Synthetically generated peptide
  VARIANT (1)..(17): Xaa = Any Amino Acid
CCXEXLACNPACTGXXA

SEQ ID NO: 7365 - protein, 15 aa, Artificial Sequence
  Synthetically generated peptide
  VARIANT (1)..(15): Xaa = Any Amino Acid
CCXELXACNPACTGA

SEQ ID NO: 7366 - protein, 16 aa, Artificial Sequence
  Synthetically generated peptide
  VARIANT (1)..(16): Xaa = Any Amino Acid
CCXELXXACNPACTGA

SEQ ID NO: 7367 - protein, 17 aa, Artificial Sequence
  Synthetically generated peptide
  VARIANT (1)..(17): Xaa = Any Amino Acid
CCXELXXXACNPACTGA

SEQ ID NO: 7368 - protein, 17 aa, Artificial Sequence
  Synthetically generated peptide
  VARIANT (1)..(17): Xaa = Any Amino Acid
CCXELXXACXNPACTGA

SEQ ID NO: 7369 - protein, 17 aa, Artificial Sequence
  Synthetically generated peptide
  VARIANT (1)..(17): Xaa = Any Amino Acid
CCXELXXACNXPACTGA

SEQ ID NO: 7370 - protein, 17 aa, Artificial Sequence
  Synthetically generated peptide
  VARIANT (1)..(17): Xaa = Any Amino Acid
CCXELXXACNPXACTGA

SEQ ID NO: 7371 - protein, 17 aa, Artificial Sequence
  Synthetically generated peptide
  VARIANT (1)..(17): Xaa = Any Amino Acid
CCXELXXACNPAXCTGA

SEQ ID NO: 7372 - protein, 17 aa, Artificial Sequence
  Synthetically generated peptide
  VARIANT (1)..(17): Xaa = Any Amino Acid
CCXELXXACNPACXTGA

SEQ ID NO: 7373 - protein, 17 aa, Artificial Sequence
  Synthetically generated peptide
  VARIANT (1)..(17): Xaa = Any Amino Acid
CCXELXXACNPACTXGA

SEQ ID NO: 7374 - protein, 17 aa, Artificial Sequence
  Synthetically generated peptide
  VARIANT (1)..(17): Xaa = Any Amino Acid
CCXELXXACNPACTGXA

SEQ ID NO: 7375 - protein, 16 aa, Artificial Sequence
  Synthetically generated peptide
  VARIANT (1)..(16): Xaa = Any Amino Acid
CCXELXACXNPACTGA

SEQ ID NO: 7376 - protein, 17 aa, Artificial Sequence
  Synthetically generated peptide
  VARIANT (1)..(17): Xaa = Any Amino Acid
CCXELXACXXNPACTGA

SEQ ID NO: 7377 - protein, 17 aa, Artificial Sequence
  Synthetically generated peptide
  VARIANT (1)..(17): Xaa = Any Amino Acid
CCXELXACXNXPACTGA

SEQ ID NO: 7378 - protein, 17 aa, Artificial Sequence
  Synthetically generated peptide
  VARIANT (1)..(17): Xaa = Any Amino Acid
CCXELXACXNPXACTGA

SEQ ID NO: 7379 - protein, 17 aa, Artificial Sequence
  Synthetically generated peptide
  VARIANT (1)..(17): Xaa = Any Amino Acid
CCXELXACXNPAXCTGA

SEQ ID NO: 7380 - protein, 17 aa, Artificial Sequence
  Synthetically generated peptide
  VARIANT (1)..(17): Xaa = Any Amino Acid
CCXELXACXNPACXTGA

SEQ ID NO: 7381 - protein, 17 aa, Artificial Sequence
  Synthetically generated peptide
  VARIANT (1)..(17): Xaa = Any Amino Acid
CCXELXACXNPACTXGA

SEQ ID NO: 7382 - protein, 17 aa, Artificial Sequence
  Synthetically generated peptide
  VARIANT (1)..(17): Xaa = Any Amino Acid
CCXELXACXNPACTGXA

SEQ ID NO: 7383 - protein, 16 aa, Artificial Sequence
  Synthetically generated peptide
  VARIANT (1)..(16): Xaa = Any Amino Acid
CCXELXACNXPACTGA

SEQ ID NO: 7384 - protein, 17 aa, Artificial Sequence
  Synthetically generated peptide
  VARIANT (1)..(17): Xaa = Any Amino Acid
CCXELXACNXXPACTGA

SEQ ID NO: 7385 - protein, 17 aa, Artificial Sequence
  Synthetically generated peptide
  VARIANT (1)..(17): Xaa = Any Amino Acid
CCXELXACNXPXACTGA

SEQ ID NO: 7386 - protein, 17 aa, Artificial Sequence
  Synthetically generated peptide
  VARIANT (1)..(17): Xaa = Any Amino Acid
CCXELXACNXPAXCTGA

SEQ ID NO: 7387 - protein, 17 aa, Artificial Sequence
  Synthetically generated peptide
  VARIANT (1)..(17): Xaa = Any Amino Acid
CCXELXACNXPACXTGA

SEQ ID NO: 7388 - protein, 17 aa, Artificial Sequence
  Synthetically generated peptide
  VARIANT (1)..(17): Xaa = Any Amino Acid
CCXELXACNXPACTXGA

SEQ ID NO: 7389 - protein, 17 aa, Artificial Sequence
  Synthetically generated peptide
  VARIANT (1)..(17): Xaa = Any Amino Acid
CCXELXACNXPACTGXA

SEQ ID NO: 7390 - protein, 16 aa, Artificial Sequence
  Synthetically generated peptide
  VARIANT (1)..(16): Xaa = Any Amino Acid
CCXELXACNPXACTGA

SEQ ID NO: 7391 - protein, 17 aa, Artificial Sequence
  Synthetically generated peptide
  VARIANT (1)..(17): Xaa = Any Amino Acid
CCXELXACNPXXACTGA

SEQ ID NO: 7392 - protein, 17 aa, Artificial Sequence
  Synthetically generated peptide
  VARIANT (1)..(17): Xaa = Any Amino Acid
CCXELXACNPXAXCTGA

SEQ ID NO: 7393 - protein, 17 aa, Artificial Sequence
  Synthetically generated peptide
  VARIANT (1)..(17): Xaa = Any Amino Acid
CCXELXACNPXACXTGA

SEQ ID NO: 7394 - protein, 17 aa, Artificial Sequence
  Synthetically generated peptide
  VARIANT (1)..(17): Xaa = Any Amino Acid
CCXELXACNPXACTXGA

SEQ ID NO: 7395 - protein, 17 aa, Artificial Sequence
  Synthetically generated peptide
  VARIANT (1)..(17): Xaa = Any Amino Acid
CCXELXACNPXACTGXA

SEQ ID NO: 7396 - protein, 16 aa, Artificial Sequence
  Synthetically generated peptide
  VARIANT (1)..(16): Xaa = Any Amino Acid
CCXELXACNPAXCTGA

SEQ ID NO: 7397 - protein, 17 aa, Artificial Sequence
  Synthetically generated peptide
  VARIANT (1)..(17): Xaa = Any Amino Acid
CCXELXACNPAXXCTGA

SEQ ID NO: 7398 - protein, 17 aa, Artificial Sequence
  Synthetically generated peptide
  VARIANT (1)..(17): Xaa = Any Amino Acid
CCXELXACNPAXCXTGA

SEQ ID NO: 7399 - protein, 17 aa, Artificial Sequence
  Synthetically generated peptide
  VARIANT (1)..(17): Xaa = Any Amino Acid
CCXELXACNPAXCTXGA

SEQ ID NO: 7400 - protein, 17 aa, Artificial Sequence
  Synthetically generated peptide
  VARIANT (1)..(17): Xaa = Any Amino Acid
CCXELXACNPAXCTGXA

SEQ ID NO: 7401 - protein, 16 aa, Artificial Sequence
  Synthetically generated peptide
  VARIANT (1)..(16): Xaa = Any Amino Acid
CCXELXACNPACXTGA

SEQ ID NO: 7402 - protein, 17 aa, Artificial Sequence
  Synthetically generated peptide
  VARIANT (1)..(17): Xaa = Any Amino Acid
CCXELXACNPACXXTGA

SEQ ID NO: 7403 - protein, 17 aa, Artificial Sequence
  Synthetically generated peptide
  VARIANT (1)..(17): Xaa = Any Amino Acid
CCXELXACNPACXTXGA

SEQ ID NO: 7404 - protein, 17 aa, Artificial Sequence
  Synthetically generated peptide
  VARIANT (1)..(17): Xaa = Any Amino Acid
CCXELXACNPACXTGXA

SEQ ID NO: 7405 - protein, 16 aa, Artificial Sequence
  Synthetically generated peptide
  VARIANT (1)..(16): Xaa = Any Amino Acid
CCXELXACNPACTXGA

SEQ ID NO: 7406 - protein, 17 aa, Artificial Sequence
  Synthetically generated peptide
  VARIANT (1)..(17): Xaa = Any Amino Acid
CCXELXACNPACTXXGA

SEQ ID NO: 7407 - protein, 17 aa, Artificial Sequence
  Synthetically generated peptide
  VARIANT (1)..(17): Xaa = Any Amino Acid
CCXELXACNPACTXGXA

SEQ ID NO: 7408 - protein, 16 aa, Artificial Sequence
  Synthetically generated peptide
  VARIANT (1)..(16): Xaa = Any Amino Acid
CCXELXACNPACTGXA

SEQ ID NO: 7409 - protein, 17 aa, Artificial Sequence
  Synthetically generated peptide
  VARIANT (1)..(17): Xaa = Any Amino Acid
CCXELXACNPACTGXXA

SEQ ID NO: 7410 - protein, 15 aa, Artificial Sequence
  Synthetically generated peptide
  VARIANT (1)..(15): Xaa = Any Amino Acid
CCXELACXNPACTGA

SEQ ID NO: 7411 - protein, 16 aa, Artificial Sequence
  Synthetically generated peptide
  VARIANT (1)..(16): Xaa = Any Amino Acid
CCXELACXXNPACTGA

SEQ ID NO: 7412 - protein, 17 aa, Artificial Sequence
  Synthetically generated peptide
  VARIANT (1)..(17): Xaa = Any Amino Acid
CCXELACXXXNPACTGA

SEQ ID NO: 7413 - protein, 17 aa, Artificial Sequence
  Synthetically generated peptide
  VARIANT (1)..(17): Xaa = Any Amino Acid
CCXELACXXNXPACTGA

SEQ ID NO: 7414 - protein, 17 aa, Artificial Sequence
  Synthetically generated peptide
  VARIANT (1)..(17): Xaa = Any Amino Acid
CCXELACXXNPXACTGA

SEQ ID NO: 7415 - protein, 17 aa, Artificial Sequence
  Synthetically generated peptide
  VARIANT (1)..(17): Xaa = Any Amino Acid
CCXELACXXNPAXCTGA

SEQ ID NO: 7416 - protein, 17 aa, Artificial Sequence
  Synthetically generated peptide
  VARIANT (1)..(17): Xaa = Any Amino Acid
CCXELACXXNPACXTGA

SEQ ID NO: 7417 - protein, 17 aa, Artificial Sequence
  Synthetically generated peptide
  VARIANT (1)..(17): Xaa = Any Amino Acid
CCXELACXXNPACTXGA

SEQ ID NO: 7418 - protein, 17 aa, Artificial Sequence
  Synthetically generated peptide
  VARIANT (1)..(17): Xaa = Any Amino Acid
CCXELACXXNPACTGXA

SEQ ID NO: 7419 - protein, 16 aa, Artificial Sequence
  Synthetically generated peptide
  VARIANT (1)..(16): Xaa = Any Amino Acid
CCXELACXNXPACTGA

SEQ ID NO: 7420 - protein, 17 aa, Artificial Sequence
  Synthetically generated peptide
  VARIANT (1)..(17): Xaa = Any Amino Acid
CCXELACXNXXPACTGA

SEQ ID NO: 7421 - protein, 17 aa, Artificial Sequence
  Synthetically generated peptide
  VARIANT (1)..(17): Xaa = Any Amino Acid
CCXELACXNXPXACTGA

SEQ ID NO: 7422 - protein, 17 aa, Artificial Sequence
  Synthetically generated peptide
  VARIANT (1)..(17): Xaa = Any Amino Acid
CCXELACXNXPAXCTGA

SEQ ID NO: 7423 - protein, 17 aa, Artificial Sequence
  Synthetically generated peptide
  VARIANT (1)..(17): Xaa = Any Amino Acid
CCXELACXNXPACXTGA

SEQ ID NO: 7424 - protein, 17 aa, Artificial Sequence
  Synthetically generated peptide
  VARIANT (1)..(17): Xaa = Any Amino Acid
CCXELACXNXPACTXGA

SEQ ID NO: 7425 - protein, 17 aa, Artificial Sequence
  Synthetically generated peptide
  VARIANT (1)..(17): Xaa = Any Amino Acid
CCXELACXNXPACTGXA

SEQ ID NO: 7426 - protein, 16 aa, Artificial Sequence
  Synthetically generated peptide
  VARIANT (1)..(16): Xaa = Any Amino Acid
CCXELACXNPXACTGA

SEQ ID NO: 7427 - protein, 17 aa, Artificial Sequence
  Synthetically generated peptide
  VARIANT (1)..(17): Xaa = Any Amino Acid
CCXELACXNPXXACTGA

SEQ ID NO: 7428 - protein, 17 aa, Artificial Sequence
  Synthetically generated peptide
  VARIANT (1)..(17): Xaa = Any Amino Acid
CCXELACXNPXAXCTGA

SEQ ID NO: 7429 - protein, 17 aa, Artificial Sequence
  Synthetically generated peptide
  VARIANT (1)..(17): Xaa = Any Amino Acid
CCXELACXNPXACXTGA

SEQ ID NO: 7430 - protein, 17 aa, Artificial Sequence
  Synthetically generated peptide
  VARIANT (1)..(17): Xaa = Any Amino Acid
CCXELACXNPXACTXGA

SEQ ID NO: 7431 - protein, 17 aa, Artificial Sequence
  Synthetically generated peptide
  VARIANT (1)..(17): Xaa = Any Amino Acid
CCXELACXNPXACTGXA

SEQ ID NO: 7432 - protein, 16 aa, Artificial Sequence
  Synthetically generated peptide
  VARIANT (1)..(16): Xaa = Any Amino Acid
CCXELACXNPAXCTGA

SEQ ID NO: 7433 - protein, 17 aa, Artificial Sequence
  Synthetically generated peptide
  VARIANT (1)..(17): Xaa = Any Amino Acid
CCXELACXNPAXXCTGA

SEQ ID NO: 7434 - protein, 17 aa, Artificial Sequence
  Synthetically generated peptide
  VARIANT (1)..(17): Xaa = Any Amino Acid
CCXELACXNPAXCXTGA

SEQ ID NO: 7435 - protein, 17 aa, Artificial Sequence
  Synthetically generated peptide
  VARIANT (1)..(17): Xaa = Any Amino Acid
CCXELACXNPAXCTXGA

SEQ ID NO: 7436 - protein, 17 aa, Artificial Sequence
  Synthetically generated peptide
  VARIANT (1)..(17): Xaa = Any Amino Acid
CCXELACXNPAXCTGXA

SEQ ID NO: 7437 - protein, 16 aa, Artificial Sequence
  Synthetically generated peptide
  VARIANT (1)..(16): Xaa = Any Amino Acid
CCXELACXNPACXTGA

SEQ ID NO: 7438 - protein, 17 aa, Artificial Sequence
  Synthetically generated peptide
  VARIANT (1)..(17): Xaa = Any Amino Acid
CCXELACXNPACXXTGA

SEQ ID NO: 7439 - protein, 17 aa, Artificial Sequence
  Synthetically generated peptide
  VARIANT (1)..(17): Xaa = Any Amino Acid
CCXELACXNPACXTXGA

SEQ ID NO: 7440 - protein, 17 aa, Artificial Sequence
  Synthetically generated peptide
  VARIANT (1)..(17): Xaa = Any Amino Acid
CCXELACXNPACXTGXA

SEQ ID NO: 7441 - protein, 16 aa, Artificial Sequence
  Synthetically generated peptide
  VARIANT (1)..(16): Xaa = Any Amino Acid
CCXELACXNPACTXGA

SEQ ID NO: 7442 - protein, 17 aa, Artificial Sequence
  Synthetically generated peptide
  VARIANT (1)..(17): Xaa = Any Amino Acid
CCXELACXNPACTXXGA

SEQ ID NO: 7443 - protein, 17 aa, Artificial Sequence
  Synthetically generated peptide
  VARIANT (1)..(17): Xaa = Any Amino Acid
CCXELACXNPACTXGXA

SEQ ID NO: 7444 - protein, 16 aa, Artificial Sequence
  Synthetically generated peptide
  VARIANT (1)..(16): Xaa = Any Amino Acid
CCXELACXNPACTGXA

SEQ ID NO: 7445 - protein, 17 aa, Artificial Sequence
  Synthetically generated peptide
  VARIANT (1)..(17): Xaa = Any Amino Acid
CCXELACXNPACTGXXA

SEQ ID NO: 7446 - protein, 15 aa, Artificial Sequence
  Synthetically generated peptide
  VARIANT (1)..(15): Xaa = Any Amino Acid
CCXELACNXPACTGA

SEQ ID NO: 7447 - protein, 16 aa, Artificial Sequence
  Synthetically generated peptide
  VARIANT (1)..(16): Xaa = Any Amino Acid
CCXELACNXXPACTGA

SEQ ID NO: 7448 - protein, 17 aa, Artificial Sequence
  Synthetically generated peptide
  VARIANT (1)..(17): Xaa = Any Amino Acid
CCXELACNXXXPACTGA

SEQ ID NO: 7449 - protein, 17 aa, Artificial Sequence
  Synthetically generated peptide
  VARIANT (1)..(17): Xaa = Any Amino Acid
CCXELACNXXPXACTGA

SEQ ID NO: 7450 - protein, 17 aa, Artificial Sequence
  Synthetically generated peptide
  VARIANT (1)..(17): Xaa = Any Amino Acid
CCXELACNXXPAXCTGA

SEQ ID NO: 7451 - protein, 17 aa, Artificial Sequence
  Synthetically generated peptide
  VARIANT (1)..(17): Xaa = Any Amino Acid
CCXELACNXXPACXTGA

SEQ ID NO: 7452 - protein, 17 aa, Artificial Sequence
  Synthetically generated peptide
  VARIANT (1)..(17): Xaa = Any Amino Acid
CCXELACNXXPACTXGA

SEQ ID NO: 7453 - protein, 17 aa, Artificial Sequence
  Synthetically generated peptide
  VARIANT (1)..(17): Xaa = Any Amino Acid
CCXELACNXXPACTGXA

SEQ ID NO: 7454 - protein, 16 aa, Artificial Sequence
  Synthetically generated peptide
  VARIANT (1)..(16): Xaa = Any Amino Acid
CCXELACNXPXACTGA

SEQ ID NO: 7455 - protein, 17 aa, Artificial Sequence
  Synthetically generated peptide
  VARIANT (1)..(17): Xaa = Any Amino Acid
CCXELACNXPXXACTGA

SEQ ID NO: 7456 - protein, 17 aa, Artificial Sequence
  Synthetically generated peptide
  VARIANT (1)..(17): Xaa = Any Amino Acid
CCXELACNXPXAXCTGA

SEQ ID NO: 7457 - protein, 17 aa, Artificial Sequence
  Synthetically generated peptide
  VARIANT (1)..(17): Xaa = Any Amino Acid
CCXELACNXPXACXTGA

SEQ ID NO: 7458 - protein, 17 aa, Artificial Sequence
  Synthetically generated peptide
  VARIANT (1)..(17): Xaa = Any Amino Acid
CCXELACNXPXACTXGA

SEQ ID NO: 7459 - protein, 17 aa, Artificial Sequence
  Synthetically generated peptide
  VARIANT (1)..(17): Xaa = Any Amino Acid
CCXELACNXPXACTGXA

SEQ ID NO: 7460 - protein, 16 aa, Artificial Sequence
  Synthetically generated peptide
  VARIANT (1)..(16): Xaa = Any Amino Acid
CCXELACNXPAXCTGA

SEQ ID NO: 7461 - protein, 17 aa, Artificial Sequence
  Synthetically generated peptide
  VARIANT (1)..(17): Xaa = Any Amino Acid
CCXELACNXPAXXCTGA

SEQ ID NO: 7462 - protein, 17 aa, Artificial Sequence
  Synthetically generated peptide
  VARIANT (1)..(17): Xaa = Any Amino Acid
CCXELACNXPAXCXTGA

SEQ ID NO: 7463 - protein, 17 aa, Artificial Sequence
  Synthetically generated peptide
  VARIANT (1)..(17): Xaa = Any Amino Acid
CCXELACNXPAXCTXGA

SEQ ID NO: 7464 - protein, 17 aa, Artificial Sequence
  Synthetically generated peptide
  VARIANT (1)..(17): Xaa = Any Amino Acid
CCXELACNXPAXCTGXA

SEQ ID NO: 7465 - protein, 16 aa, Artificial Sequence
  Synthetically generated peptide
  VARIANT (1)..(16): Xaa = Any Amino Acid
CCXELACNXPACXTGA

SEQ ID NO: 7466 - protein, 17 aa, Artificial Sequence
  Synthetically generated peptide
  VARIANT (1)..(17): Xaa = Any Amino Acid
CCXELACNXPACXXTGA

SEQ ID NO: 7467 - protein, 17 aa, Artificial Sequence
  Synthetically generated peptide
  VARIANT (1)..(17): Xaa = Any Amino Acid
CCXELACNXPACXTXGA

SEQ ID NO: 7468 - protein, 17 aa, Artificial Sequence
  Synthetically generated peptide
  VARIANT (1)..(17): Xaa = Any Amino Acid
CCXELACNXPACXTGXA

SEQ ID NO: 7469 - protein, 16 aa, Artificial Sequence
  Synthetically generated peptide
  VARIANT (1)..(16): Xaa = Any Amino Acid
CCXELACNXPACTXGA

SEQ ID NO: 7470 - protein, 17 aa, Artificial Sequence
  Synthetically generated peptide
  VARIANT (1)..(17): Xaa = Any Amino Acid
CCXELACNXPACTXXGA

SEQ ID NO: 7471 - protein, 17 aa, Artificial Sequence
  Synthetically generated peptide
  VARIANT (1)..(17): Xaa = Any Amino Acid
CCXELACNXPACTXGXA

SEQ ID NO: 7472 - protein, 16 aa, Artificial Sequence
  Synthetically generated peptide
  VARIANT (1)..(16): Xaa = Any Amino Acid
CCXELACNXPACTGXA

SEQ ID NO: 7473 - protein, 17 aa, Artificial Sequence
  Synthetically generated peptide
  VARIANT (1)..(17): Xaa = Any Amino Acid
CCXELACNXPACTGXXA

SEQ ID NO: 7474 - protein, 15 aa, Artificial Sequence
  Synthetically generated peptide
  VARIANT (1)..(15): Xaa = Any Amino Acid
CCXELACNPXACTGA

SEQ ID NO: 7475 - protein, 16 aa, Artificial Sequence
  Synthetically generated peptide
  VARIANT (1)..(16): Xaa = Any Amino Acid
CCXELACNPXXACTGA

SEQ ID NO: 7476 - protein, 17 aa, Artificial Sequence
  Synthetically generated peptide
  VARIANT (1)..(17): Xaa = Any Amino Acid
CCXELACNPXXXACTGA

SEQ ID NO: 7477 - protein, 17 aa, Artificial Sequence
  Synthetically generated peptide
  VARIANT (1)..(17): Xaa = Any Amino Acid
CCXELACNPXXAXCTGA

SEQ ID NO: 7478 - protein, 17 aa, Artificial Sequence
  Synthetically generated peptide
  VARIANT (1)..(17): Xaa = Any Amino Acid
CCXELACNPXXACXTGA

SEQ ID NO: 7479 - protein, 17 aa, Artificial Sequence
  Synthetically generated peptide
  VARIANT (1)..(17): Xaa = Any Amino Acid
CCXELACNPXXACTXGA

SEQ ID NO: 7480 - protein, 17 aa, Artificial Sequence
  Synthetically generated peptide
  VARIANT (1)..(17): Xaa = Any Amino Acid
CCXELACNPXXACTGXA

SEQ ID NO: 7481 - protein, 16 aa, Artificial Sequence
  Synthetically generated peptide
  VARIANT (1)..(16): Xaa = Any Amino Acid
CCXELACNPXAXCTGA

SEQ ID NO: 7482 - protein, 17 aa, Artificial Sequence
  Synthetically generated peptide
  VARIANT (1)..(17): Xaa = Any Amino Acid
CCXELACNPXAXXCTGA

SEQ ID NO: 7483 - protein, 17 aa, Artificial Sequence
  Synthetically generated peptide
  VARIANT (1)..(17): Xaa = Any Amino Acid
CCXELACNPXAXCXTGA

SEQ ID NO: 7484 - protein, 17 aa, Artificial Sequence
  Synthetically generated peptide
  VARIANT (1)..(17): Xaa = Any Amino Acid
CCXELACNPXAXCTXGA

SEQ ID NO: 7485 - protein, 17 aa, Artificial Sequence
  Synthetically generated peptide
  VARIANT (1)..(17): Xaa = Any Amino Acid
CCXELACNPXAXCTGXA

SEQ ID NO: 7486 - protein, 16 aa, Artificial Sequence
  Synthetically generated peptide
  VARIANT (1)..(16): Xaa = Any Amino Acid
CCXELACNPXACXTGA

SEQ ID NO: 7487 - protein, 17 aa, Artificial Sequence
  Synthetically generated peptide
  VARIANT (1)..(17): Xaa = Any Amino Acid
CCXELACNPXACXXTGA

SEQ ID NO: 7488 - protein, 17 aa, Artificial Sequence
  Synthetically generated peptide
  VARIANT (1)..(17): Xaa = Any Amino Acid
CCXELACNPXACXTXGA

SEQ ID NO: 7489 - protein, 17 aa, Artificial Sequence
  Synthetically generated peptide
  VARIANT (1)..(17): Xaa = Any Amino Acid
CCXELACNPXACXTGXA

SEQ ID NO: 7490 - protein, 16 aa, Artificial Sequence
  Synthetically generated peptide
  VARIANT (1)..(16): Xaa = Any Amino Acid
CCXELACNPXACTXGA

SEQ ID NO: 7491 - protein, 17 aa, Artificial Sequence
  Synthetically generated peptide
  VARIANT (1)..(17): Xaa = Any Amino Acid
CCXELACNPXACTXXGA

SEQ ID NO: 7492 - protein, 17 aa, Artificial Sequence
  Synthetically generated peptide
  VARIANT (1)..(17): Xaa = Any Amino Acid
CCXELACNPXACTXGXA

SEQ ID NO: 7493 - protein, 16 aa, Artificial Sequence
  Synthetically generated peptide
  VARIANT (1)..(16): Xaa = Any Amino Acid
CCXELACNPXACTGXA

SEQ ID NO: 7494 - protein, 17 aa, Artificial Sequence
  Synthetically generated peptide
  VARIANT (1)..(17): Xaa = Any Amino Acid
CCXELACNPXACTGXXA

SEQ ID NO: 7495 - protein, 15 aa, Artificial Sequence
  Synthetically generated peptide
  VARIANT (1)..(15): Xaa = Any Amino Acid
CCXELACNPAXCTGA

SEQ ID NO: 7496 - protein, 16 aa, Artificial Sequence
  Synthetically generated peptide
  VARIANT (1)..(16): Xaa = Any Amino Acid
CCXELACNPAXXCTGA

SEQ ID NO: 7497 - protein, 17 aa, Artificial Sequence
  Synthetically generated peptide
  VARIANT (1)..(17): Xaa = Any Amino Acid
CCXELACNPAXXXCTGA

SEQ ID NO: 7498 - protein, 17 aa, Artificial Sequence
  Synthetically generated peptide
  VARIANT (1)..(17): Xaa = Any Amino Acid
CCXELACNPAXXCXTGA

SEQ ID NO: 7499 - protein, 17 aa, Artificial Sequence
  Synthetically generated peptide
  VARIANT (1)..(17): Xaa = Any Amino Acid
CCXELACNPAXXCTXGA

SEQ ID NO: 7500 - protein, 17 aa, Artificial Sequence
  Synthetically generated peptide
  VARIANT (1)..(17): Xaa = Any Amino Acid
CCXELACNPAXXCTGXA

SEQ ID NO: 7501 - protein, 16 aa, Artificial Sequence
  Synthetically generated peptide
  VARIANT (1)..(16): Xaa = Any Amino Acid
CCXELACNPAXCXTGA

SEQ ID NO: 7502 - protein, 17 aa, Artificial Sequence
  Synthetically generated peptide
  VARIANT (1)..(17): Xaa = Any Amino Acid
CCXELACNPAXCXXTGA

SEQ ID NO: 7503 - protein, 17 aa, Artificial Sequence
  Synthetically generated peptide
  VARIANT (1)..(17): Xaa = Any Amino Acid
CCXELACNPAXCXTXGA

SEQ ID NO: 7504 - protein, 17 aa, Artificial Sequence
  Synthetically generated peptide
  VARIANT (1)..(17): Xaa = Any Amino Acid
CCXELACNPAXCXTGXA

SEQ ID NO: 7505 - protein, 16 aa, Artificial Sequence
  Synthetically generated peptide
  VARIANT (1)..(16): Xaa = Any Amino Acid
CCXELACNPAXCTXGA

SEQ ID NO: 7506 - protein, 17 aa, Artificial Sequence
  Synthetically generated peptide
  VARIANT (1)..(17): Xaa = Any Amino Acid
CCXELACNPAXCTXXGA

SEQ ID NO: 7507 - protein, 17 aa, Artificial Sequence
  Synthetically generated peptide
  VARIANT (1)..(17): Xaa = Any Amino Acid
CCXELACNPAXCTXGXA

SEQ ID NO: 7508 - protein, 16 aa, Artificial Sequence
  Synthetically generated peptide
  VARIANT (1)..(16): Xaa = Any Amino Acid
CCXELACNPAXCTGXA

SEQ ID NO: 7509 - protein, 17 aa, Artificial Sequence
  Synthetically generated peptide
  VARIANT (1)..(17): Xaa = Any Amino Acid
CCXELACNPAXCTGXXA

SEQ ID NO: 7510 - protein, 15 aa, Artificial Sequence
  Synthetically generated peptide
  VARIANT (1)..(15): Xaa = Any Amino Acid
CCXELACNPACXTGA

SEQ ID NO: 7511 - protein, 16 aa, Artificial Sequence
  Synthetically generated peptide
  VARIANT (1)..(16): Xaa = Any Amino Acid
CCXELACNPACXXTGA

SEQ ID NO: 7512 - protein, 17 aa, Artificial Sequence
  Synthetically generated peptide
  VARIANT (1)..(17): Xaa = Any Amino Acid
CCXELACNPACXXXTGA

SEQ ID NO: 7513 - protein, 17 aa, Artificial Sequence
  Synthetically generated peptide
  VARIANT (1)..(17): Xaa = Any Amino Acid
CCXELACNPACXXTXGA

SEQ ID NO: 7514 - protein, 17 aa, Artificial Sequence
  Synthetically generated peptide
  VARIANT (1)..(17): Xaa = Any Amino Acid
CCXELACNPACXXTGXA

SEQ ID NO: 7515 - protein, 16 aa, Artificial Sequence
  Synthetically generated peptide
  VARIANT (1)..(16): Xaa = Any Amino Acid
CCXELACNPACXTXGA

SEQ ID NO: 7516 - protein, 17 aa, Artificial Sequence
  Synthetically generated peptide
  VARIANT (1)..(17): Xaa = Any Amino Acid
CCXELACNPACXTXXGA

SEQ ID NO: 7517 - protein, 17 aa, Artificial Sequence
  Synthetically generated peptide
  VARIANT (1)..(17): Xaa = Any Amino Acid
CCXELACNPACXTXGXA

SEQ ID NO: 7518 - protein, 16 aa, Artificial Sequence
  Synthetically generated peptide
  VARIANT (1)..(16): Xaa = Any Amino Acid
CCXELACNPACXTGXA

SEQ ID NO: 7519 - protein, 17 aa, Artificial Sequence
  Synthetically generated peptide
  VARIANT (1)..(17): Xaa = Any Amino Acid
CCXELACNPACXTGXXA

SEQ ID NO: 7520 - protein, 15 aa, Artificial Sequence
  Synthetically generated peptide
  VARIANT (1)..(15): Xaa = Any Amino Acid
CCXELACNPACTXGA

SEQ ID NO: 7521 - protein, 16 aa, Artificial Sequence
  Synthetically generated peptide
  VARIANT (1)..(16): Xaa = Any Amino Acid
CCXELACNPACTXXGA

SEQ ID NO: 7522 - protein, 17 aa, Artificial Sequence
  Synthetically generated peptide
  VARIANT (1)..(17): Xaa = Any Amino Acid
CCXELACNPACTXXXGA

SEQ ID NO: 7523 - protein, 17 aa, Artificial Sequence
  Synthetically generated peptide
  VARIANT (1)..(17): Xaa = Any Amino Acid
CCXELACNPACTXXGXA

SEQ ID NO: 7524 - protein, 16 aa, Artificial Sequence
  Synthetically generated peptide
  VARIANT (1)..(16): Xaa = Any Amino Acid
CCXELACNPACTXGXA

SEQ ID NO: 7525 - protein, 17 aa, Artificial Sequence
  Synthetically generated peptide
  VARIANT (1)..(17): Xaa = Any Amino Acid
CCXELACNPACTXGXXA

SEQ ID NO: 7526 - protein, 15 aa, Artificial Sequence
  Synthetically generated peptide
  VARIANT (1)..(15): Xaa = Any Amino Acid
CCXELACNPACTGXA

SEQ ID NO: 7527 - protein, 16 aa, Artificial Sequence
  Synthetically generated peptide
  VARIANT (1)..(16): Xaa = Any Amino Acid
CCXELACNPACTGXXA

SEQ ID NO: 7528 - protein, 17 aa, Artificial Sequence
  Synthetically generated peptide
  VARIANT (1)..(17): Xaa = Any Amino Acid
CCXELACNPACTGXXXA

SEQ ID NO: 7529 - protein, 14 aa, Artificial Sequence
  Synthetically generated peptide
  VARIANT (1)..(14): Xaa = Any Amino Acid
CCEXLACNPACTGA

SEQ ID NO: 7530 - protein, 15 aa, Artificial Sequence
  Synthetically generated peptide
  VARIANT (1)..(15): Xaa = Any Amino Acid
CCEXXLACNPACTGA

SEQ ID NO: 7531 - protein, 16 aa, Artificial Sequence
  Synthetically generated peptide
  VARIANT (1)..(16): Xaa = Any Amino Acid
CCEXXXLACNPACTGA

SEQ ID NO: 7532 - protein, 17 aa, Artificial Sequence
  Synthetically generated peptide
  VARIANT (1)..(17): Xaa = Any Amino Acid
CCEXXXXLACNPACTGA

SEQ ID NO: 7533 - protein, 17 aa, Artificial Sequence
  Synthetically generated peptide
  VARIANT (1)..(17): Xaa = Any Amino Acid
CCEXXXLXACNPACTGA

SEQ ID NO: 7534 - protein, 17 aa, Artificial Sequence
  Synthetically generated peptide
  VARIANT (1)..(17): Xaa = Any Amino Acid
CCEXXXLACXNPACTGA

SEQ ID NO: 7535 - protein, 17 aa, Artificial Sequence
  Synthetically generated peptide
  VARIANT (1)..(17): Xaa = Any Amino Acid
CCEXXXLACNXPACTGA

SEQ ID NO: 7536 - protein, 17 aa, Artificial Sequence
  Synthetically generated peptide
  VARIANT (1)..(17): Xaa = Any Amino Acid
CCEXXXLACNPXACTGA

SEQ ID NO: 7537 - protein, 17 aa, Artificial Sequence
  Synthetically generated peptide
  VARIANT (1)..(17): Xaa = Any Amino Acid
CCEXXXLACNPAXCTGA

SEQ ID NO: 7538 - protein, 17 aa, Artificial Sequence
  Synthetically generated peptide
  VARIANT (1)..(17): Xaa = Any Amino Acid
CCEXXXLACNPACXTGA

SEQ ID NO: 7539 - protein, 17 aa, Artificial Sequence
  Synthetically generated peptide
  VARIANT (1)..(17): Xaa = Any Amino Acid
CCEXXXLACNPACTXGA

SEQ ID NO: 7540 - protein, 17 aa, Artificial Sequence
  Synthetically generated peptide
  VARIANT (1)..(17): Xaa = Any Amino Acid
CCEXXXLACNPACTGXA

SEQ ID NO: 7541 - protein, 16 aa, Artificial Sequence
  Synthetically generated peptide
  VARIANT (1)..(16): Xaa = Any Amino Acid
CCEXXLXACNPACTGA

SEQ ID NO: 7542 - protein, 17 aa, Artificial Sequence
  Synthetically generated peptide
  VARIANT (1)..(17): Xaa = Any Amino Acid
CCEXXLXXACNPACTGA

SEQ ID NO: 7543 - protein, 17 aa, Artificial Sequence
  Synthetically generated peptide
  VARIANT (1)..(17): Xaa = Any Amino Acid
CCEXXLXACXNPACTGA

SEQ ID NO: 7544 - protein, 17 aa, Artificial Sequence
  Synthetically generated peptide
  VARIANT (1)..(17): Xaa = Any Amino Acid
CCEXXLXACNXPACTGA

SEQ ID NO: 7545 - protein, 17 aa, Artificial Sequence
  Synthetically generated peptide
  VARIANT (1)..(17): Xaa = Any Amino Acid
CCEXXLXACNPXACTGA

SEQ ID NO: 7546 - protein, 17 aa, Artificial Sequence
  Synthetically generated peptide
  VARIANT (1)..(17): Xaa = Any Amino Acid
CCEXXLXACNPAXCTGA

SEQ ID NO: 7547 - protein, 17 aa, Artificial Sequence
  Synthetically generated peptide
  VARIANT (1)..(17): Xaa = Any Amino Acid
CCEXXLXACNPACXTGA

SEQ ID NO: 7548 - protein, 17 aa, Artificial Sequence
  Synthetically generated peptide
  VARIANT (1)..(17): Xaa = Any Amino Acid
CCEXXLXACNPACTXGA

SEQ ID NO: 7549 - protein, 17 aa, Artificial Sequence
  Synthetically generated peptide
  VARIANT (1)..(17): Xaa = Any Amino Acid
CCEXXLXACNPACTGXA

SEQ ID NO: 7550 - protein, 16 aa, Artificial Sequence
  Synthetically generated peptide
  VARIANT (1)..(16): Xaa = Any Amino Acid
CCEXXLACXNPACTGA

SEQ ID NO: 7551 - protein, 17 aa, Artificial Sequence
  Synthetically generated peptide
  VARIANT (1)..(17): Xaa = Any Amino Acid
CCEXXLACXXNPACTGA

SEQ ID NO: 7552 - protein, 17 aa, Artificial Sequence
  Synthetically generated peptide
  VARIANT (1)..(17): Xaa = Any Amino Acid
CCEXXLACXNXPACTGA

SEQ ID NO: 7553 - protein, 17 aa, Artificial Sequence
  Synthetically generated peptide
  VARIANT (1)..(17): Xaa = Any Amino Acid
CCEXXLACXNPXACTGA

SEQ ID NO: 7554 - protein, 17 aa, Artificial Sequence
  Synthetically generated peptide
  VARIANT (1)..(17): Xaa = Any Amino Acid
CCEXXLACXNPAXCTGA

SEQ ID NO: 7555 - protein, 17 aa, Artificial Sequence
  Synthetically generated peptide
  VARIANT (1)..(17): Xaa = Any Amino Acid
CCEXXLACXNPACXTGA

SEQ ID NO: 7556 - protein, 17 aa, Artificial Sequence
  Synthetically generated peptide
  VARIANT (1)..(17): Xaa = Any Amino Acid
CCEXXLACXNPACTXGA

SEQ ID NO: 7557 - protein, 17 aa, Artificial Sequence
  Synthetically generated peptide
  VARIANT (1)..(17): Xaa = Any Amino Acid
CCEXXLACXNPACTGXA

SEQ ID NO: 7558 - protein, 16 aa, Artificial Sequence
  Synthetically generated peptide
  VARIANT (1)..(16): Xaa = Any Amino Acid
CCEXXLACNXPACTGA

SEQ ID NO: 7559 - protein, 17 aa, Artificial Sequence
  Synthetically generated peptide
  VARIANT (1)..(17): Xaa = Any Amino Acid
CCEXXLACNXXPACTGA

SEQ ID NO: 7560 - protein, 17 aa, Artificial Sequence
  Synthetically generated peptide
  VARIANT (1)..(17): Xaa = Any Amino Acid
CCEXXLACNXPXACTGA

SEQ ID NO: 7561 - protein, 17 aa, Artificial Sequence
  Synthetically generated peptide
  VARIANT (1)..(17): Xaa = Any Amino Acid
CCEXXLACNXPAXCTGA

SEQ ID NO: 7562 - protein, 17 aa, Artificial Sequence
  Synthetically generated peptide
  VARIANT (1)..(17): Xaa = Any Amino Acid
CCEXXLACNXPACXTGA

SEQ ID NO: 7563 - protein, 17 aa, Artificial Sequence
  Synthetically generated peptide
  VARIANT (1)..(17): Xaa = Any Amino Acid
CCEXXLACNXPACTXGA

SEQ ID NO: 7564 - protein, 17 aa, Artificial Sequence
  Synthetically generated peptide
  VARIANT (1)..(17): Xaa = Any Amino Acid
CCEXXLACNXPACTGXA

SEQ ID NO: 7565 - protein, 16 aa, Artificial Sequence
  Synthetically generated peptide
  VARIANT (1)..(16): Xaa = Any Amino Acid
CCEXXLACNPXACTGA

SEQ ID NO: 7566 - protein, 17 aa, Artificial Sequence
  Synthetically generated peptide
  VARIANT (1)..(17): Xaa = Any Amino Acid
CCEXXLACNPXXACTGA

SEQ ID NO: 7567 - protein, 17 aa, Artificial Sequence
  Synthetically generated peptide
  VARIANT (1)..(17): Xaa = Any Amino Acid
CCEXXLACNPXAXCTGA

SEQ ID NO: 7568 - protein, 17 aa, Artificial Sequence
  Synthetically generated peptide
  VARIANT (1)..(17): Xaa = Any Amino Acid
CCEXXLACNPXACXTGA

SEQ ID NO: 7569 - protein, 17 aa, Artificial Sequence
  Synthetically generated peptide
  VARIANT (1)..(17): Xaa = Any Amino Acid
CCEXXLACNPXACTXGA

SEQ ID NO: 7570 - protein, 17 aa, Artificial Sequence
  Synthetically generated peptide
  VARIANT (1)..(17): Xaa = Any Amino Acid
CCEXXLACNPXACTGXA

SEQ ID NO: 7571 - protein, 16 aa, Artificial Sequence
  Synthetically generated peptide
  VARIANT (1)..(16): Xaa = Any Amino Acid
CCEXXLACNPAXCTGA

SEQ ID NO: 7572 - protein, 17 aa, Artificial Sequence
  Synthetically generated peptide
  VARIANT (1)..(17): Xaa = Any Amino Acid
CCEXXLACNPAXXCTGA

SEQ ID NO: 7573 - protein, 17 aa, Artificial Sequence
  Synthetically generated peptide
  VARIANT (1)..(17): Xaa = Any Amino Acid
CCEXXLACNPAXCXTGA

SEQ ID NO: 7574 - protein, 17 aa, Artificial Sequence
  Synthetically generated peptide
  VARIANT (1)..(17): Xaa = Any Amino Acid
CCEXXLACNPAXCTXGA

SEQ ID NO: 7575 - protein, 17 aa, Artificial Sequence
  Synthetically generated peptide
  VARIANT (1)..(17): Xaa = Any Amino Acid
CCEXXLACNPAXCTGXA

SEQ ID NO: 7576 - protein, 16 aa, Artificial Sequence
  Synthetically generated peptide
  VARIANT (1)..(16): Xaa = Any Amino Acid
CCEXXLACNPACXTGA

SEQ ID NO: 7577 - protein, 17 aa, Artificial Sequence
  Synthetically generated peptide
  VARIANT (1)..(17): Xaa = Any Amino Acid
CCEXXLACNPACXXTGA

SEQ ID NO: 7578 - protein, 17 aa, Artificial Sequence
  Synthetically generated peptide
  VARIANT (1)..(17): Xaa = Any Amino Acid
CCEXXLACNPACXTXGA

SEQ ID NO: 7579 - protein, 17 aa, Artificial Sequence
  Synthetically generated peptide
  VARIANT (1)..(17): Xaa = Any Amino Acid
CCEXXLACNPACXTGXA

SEQ ID NO: 7580 - protein, 16 aa, Artificial Sequence
  Synthetically generated peptide
  VARIANT (1)..(16): Xaa = Any Amino Acid
CCEXXLACNPACTXGA

SEQ ID NO: 7581 - protein, 17 aa, Artificial Sequence
  Synthetically generated peptide
  VARIANT (1)..(17): Xaa = Any Amino Acid
CCEXXLACNPACTXXGA

SEQ ID NO: 7582 - protein, 17 aa, Artificial Sequence
  Synthetically generated peptide
  VARIANT (1)..(17): Xaa = Any Amino Acid
CCEXXLACNPACTXGXA

SEQ ID NO: 7583 - protein, 16 aa, Artificial Sequence
  Synthetically generated peptide
  VARIANT (1)..(16): Xaa = Any Amino Acid
CCEXXLACNPACTGXA

SEQ ID NO: 7584 - protein, 17 aa, Artificial Sequence
  Synthetically generated peptide
  VARIANT (1)..(17): Xaa = Any Amino Acid
CCEXXLACNPACTGXXA

SEQ ID NO: 7585 - protein, 15 aa, Artificial Sequence
  Synthetically generated peptide
  VARIANT (1)..(15): Xaa = Any Amino Acid
CCEXLXACNPACTGA

SEQ ID NO: 7586 - protein, 16 aa, Artificial Sequence
  Synthetically generated peptide
  VARIANT (1)..(16): Xaa = Any Amino Acid
CCEXLXXACNPACTGA

SEQ ID NO: 7587 - protein, 17 aa, Artificial Sequence
  Synthetically generated peptide
  VARIANT (1)..(17): Xaa = Any Amino Acid
CCEXLXXXACNPACTGA

SEQ ID NO: 7588 - protein, 17 aa, Artificial Sequence
  Synthetically generated peptide
  VARIANT (1)..(17): Xaa = Any Amino Acid
CCEXLXXACXNPACTGA

SEQ ID NO: 7589 - protein, 17 aa, Artificial Sequence
  Synthetically generated peptide
  VARIANT (1)..(17): Xaa = Any Amino Acid
CCEXLXXACNXPACTGA

SEQ ID NO: 7590 - protein, 17 aa, Artificial Sequence
  Synthetically generated peptide
  VARIANT (1)..(17): Xaa = Any Amino Acid
CCEXLXXACNPXACTGA

SEQ ID NO: 7591 - protein, 17 aa, Artificial Sequence
  Synthetically generated peptide
  VARIANT (1)..(17): Xaa = Any Amino Acid
CCEXLXXACNPAXCTGA

SEQ ID NO: 7592 - protein, 17 aa, Artificial Sequence
  Synthetically generated peptide
  VARIANT (1)..(17): Xaa = Any Amino Acid
CCEXLXXACNPACXTGA

SEQ ID NO: 7593 - protein, 17 aa, Artificial Sequence
  Synthetically generated peptide
  VARIANT (1)..(17): Xaa = Any Amino Acid
CCEXLXXACNPACTXGA

SEQ ID NO: 7594 - protein, 17 aa, Artificial Sequence
  Synthetically generated peptide
  VARIANT (1)..(17): Xaa = Any Amino Acid
CCEXLXXACNPACTGXA

SEQ ID NO: 7595 - protein, 16 aa, Artificial Sequence
  Synthetically generated peptide
  VARIANT (1)..(16): Xaa = Any Amino Acid
CCEXLXACXNPACTGA

SEQ ID NO: 7596 - protein, 17 aa, Artificial Sequence
  Synthetically generated peptide
  VARIANT (1)..(17): Xaa = Any Amino Acid
CCEXLXACXXNPACTGA

SEQ ID NO: 7597 - protein, 17 aa, Artificial Sequence
  Synthetically generated peptide
  VARIANT (1)..(17): Xaa = Any Amino Acid
CCEXLXACXNXPACTGA

SEQ ID NO: 7598 - protein, 17 aa, Artificial Sequence
  Synthetically generated peptide
  VARIANT (1)..(17): Xaa = Any Amino Acid
CCEXLXACXNPXACTGA

SEQ ID NO: 7599 - protein, 17 aa, Artificial Sequence
  Synthetically generated peptide
  VARIANT (1)..(17): Xaa = Any Amino Acid
CCEXLXACXNPAXCTGA

SEQ ID NO: 7600 - protein, 17 aa, Artificial Sequence
  Synthetically generated peptide
  VARIANT (1)..(17): Xaa = Any Amino Acid
CCEXLXACXNPACXTGA

SEQ ID NO: 7601 - protein, 17 aa, Artificial Sequence
  Synthetically generated peptide
  VARIANT (1)..(17): Xaa = Any Amino Acid
CCEXLXACXNPACTXGA

SEQ ID NO: 7602 - protein, 17 aa, Artificial Sequence
  Synthetically generated peptide
  VARIANT (1)..(17): Xaa = Any Amino Acid
CCEXLXACXNPACTGXA

SEQ ID NO: 7603 - protein, 16 aa, Artificial Sequence
  Synthetically generated peptide
  VARIANT (1)..(16): Xaa = Any Amino Acid
CCEXLXACNXPACTGA

SEQ ID NO: 7604 - protein, 17 aa, Artificial Sequence
  Synthetically generated peptide
  VARIANT (1)..(17): Xaa = Any Amino Acid
CCEXLXACNXXPACTGA

SEQ ID NO: 7605 - protein, 17 aa, Artificial Sequence
  Synthetically generated peptide
  VARIANT (1)..(17): Xaa = Any Amino Acid
CCEXLXACNXPXACTGA

SEQ ID NO: 7606 - protein, 17 aa, Artificial Sequence
  Synthetically generated peptide
  VARIANT (1)..(17): Xaa = Any Amino Acid
CCEXLXACNXPAXCTGA

SEQ ID NO: 7607 - protein, 17 aa, Artificial Sequence
  Synthetically generated peptide
  VARIANT (1)..(17): Xaa = Any Amino Acid
CCEXLXACNXPACXTGA

SEQ ID NO: 7608 - protein, 17 aa, Artificial Sequence
  Synthetically generated peptide
  VARIANT (1)..(17): Xaa = Any Amino Acid
CCEXLXACNXPACTXGA

SEQ ID NO: 7609 - protein, 17 aa, Artificial Sequence
  Synthetically generated peptide
  VARIANT (1)..(17): Xaa = Any Amino Acid
CCEXLXACNXPACTGXA

SEQ ID NO: 7610 - protein, 16 aa, Artificial Sequence
  Synthetically generated peptide
  VARIANT (1)..(16): Xaa = Any Amino Acid
CCEXLXACNPXACTGA

SEQ ID NO: 7611 - protein, 17 aa, Artificial Sequence
  Synthetically generated peptide
  VARIANT (1)..(17): Xaa = Any Amino Acid
CCEXLXACNPXXACTGA

SEQ ID NO: 7612 - protein, 17 aa, Artificial Sequence
  Synthetically generated peptide
  VARIANT (1)..(17): Xaa = Any Amino Acid
CCEXLXACNPXAXCTGA

SEQ ID NO: 7613 - protein, 17 aa, Artificial Sequence
  Synthetically generated peptide
  VARIANT (1)..(17): Xaa = Any Amino Acid
CCEXLXACNPXACXTGA

SEQ ID NO: 7614 - protein, 17 aa, Artificial Sequence
  Synthetically generated peptide
  VARIANT (1)..(17): Xaa = Any Amino Acid
CCEXLXACNPXACTXGA

SEQ ID NO: 7615 - protein, 17 aa, Artificial Sequence
  Synthetically generated peptide
  VARIANT (1)..(17): Xaa = Any Amino Acid
CCEXLXACNPXACTGXA

SEQ ID NO: 7616 - protein, 16 aa, Artificial Sequence
  Synthetically generated peptide
  VARIANT (1)..(16): Xaa = Any Amino Acid
CCEXLXACNPAXCTGA

SEQ ID NO: 7617 - protein, 17 aa, Artificial Sequence
  Synthetically generated peptide
  VARIANT (1)..(17): Xaa = Any Amino Acid
CCEXLXACNPAXXCTGA

SEQ ID NO: 7618 - protein, 17 aa, Artificial Sequence
  Synthetically generated peptide
  VARIANT (1)..(17): Xaa = Any Amino Acid
CCEXLXACNPAXCXTGA

SEQ ID NO: 7619 - protein, 17 aa, Artificial Sequence
  Synthetically generated peptide
  VARIANT (1)..(17): Xaa = Any Amino Acid
CCEXLXACNPAXCTXGA

SEQ ID NO: 7620 - protein, 17 aa, Artificial Sequence
  Synthetically generated peptide
  VARIANT (1)..(17): Xaa = Any Amino Acid
CCEXLXACNPAXCTGXA

SEQ ID NO: 7621 - protein, 16 aa, Artificial Sequence
  Synthetically generated peptide
  VARIANT (1)..(16): Xaa = Any Amino Acid
CCEXLXACNPACXTGA

SEQ ID NO: 7622 - protein, 17 aa, Artificial Sequence
  Synthetically generated peptide
  VARIANT (1)..(17): Xaa = Any Amino Acid
CCEXLXACNPACXXTGA

SEQ ID NO: 7623 - protein, 17 aa, Artificial Sequence
  Synthetically generated peptide
  VARIANT (1)..(17): Xaa = Any Amino Acid
CCEXLXACNPACXTXGA

SEQ ID NO: 7624 - protein, 17 aa, Artificial Sequence
  Synthetically generated peptide
  VARIANT (1)..(17): Xaa = Any Amino Acid
CCEXLXACNPACXTGXA

SEQ ID NO: 7625 - protein, 16 aa, Artificial Sequence
  Synthetically generated peptide
  VARIANT (1)..(16): Xaa = Any Amino Acid
CCEXLXACNPACTXGA

SEQ ID NO: 7626 - protein, 17 aa, Artificial Sequence
  Synthetically generated peptide
  VARIANT (1)..(17): Xaa = Any Amino Acid
CCEXLXACNPACTXXGA

SEQ ID NO: 7627 - protein, 17 aa, Artificial Sequence
  Synthetically generated peptide
  VARIANT (1)..(17): Xaa = Any Amino Acid
CCEXLXACNPACTXGXA

SEQ ID NO: 7628 - protein, 16 aa, Artificial Sequence
  Synthetically generated peptide
  VARIANT (1)..(16): Xaa = Any Amino Acid
CCEXLXACNPACTGXA

SEQ ID NO: 7629 - protein, 17 aa, Artificial Sequence
  Synthetically generated peptide
  VARIANT (1)..(17): Xaa = Any Amino Acid
CCEXLXACNPACTGXXA

SEQ ID NO: 7630 - protein, 15 aa, Artificial Sequence
  Synthetically generated peptide
  VARIANT (1)..(15): Xaa = Any Amino Acid
CCEXLACXNPACTGA

SEQ ID NO: 7631 - protein, 16 aa, Artificial Sequence
  Synthetically generated peptide
  VARIANT (1)..(16): Xaa = Any Amino Acid
CCEXLACXXNPACTGA

SEQ ID NO: 7632 - protein, 17 aa, Artificial Sequence
  Synthetically generated peptide
  VARIANT (1)..(17): Xaa = Any Amino Acid
CCEXLACXXXNPACTGA

SEQ ID NO: 7633 - protein, 17 aa, Artificial Sequence
  Synthetically generated peptide
  VARIANT (1)..(17): Xaa = Any Amino Acid
CCEXLACXXNXPACTGA

SEQ ID NO: 7634 - protein, 17 aa, Artificial Sequence
  Synthetically generated peptide
  VARIANT (1)..(17): Xaa = Any Amino Acid
CCEXLACXXNPXACTGA

SEQ ID NO: 7635 - protein, 17 aa, Artificial Sequence
  Synthetically generated peptide
  VARIANT (1)..(17): Xaa = Any Amino Acid
CCEXLACXXNPAXCTGA

SEQ ID NO: 7636 - protein, 17 aa, Artificial Sequence
  Synthetically generated peptide
  VARIANT (1)..(17): Xaa = Any Amino Acid
CCEXLACXXNPACXTGA

SEQ ID NO: 7637 - protein, 17 aa, Artificial Sequence
  Synthetically generated peptide
  VARIANT (1)..(17): Xaa = Any Amino Acid
CCEXLACXXNPACTXGA

SEQ ID NO: 7638 - protein, 17 aa, Artificial Sequence
  Synthetically generated peptide
  VARIANT (1)..(17): Xaa = Any Amino Acid
CCEXLACXXNPACTGXA

SEQ ID NO: 7639 - protein, 16 aa, Artificial Sequence
  Synthetically generated peptide
  VARIANT (1)..(16): Xaa = Any Amino Acid
CCEXLACXNXPACTGA

SEQ ID NO: 7640 - protein, 17 aa, Artificial Sequence
  Synthetically generated peptide
  VARIANT (1)..(17): Xaa = Any Amino Acid
CCEXLACXNXXPACTGA

SEQ ID NO: 7641 - protein, 17 aa, Artificial Sequence
  Synthetically generated peptide
  VARIANT (1)..(17): Xaa = Any Amino Acid
CCEXLACXNXPXACTGA

SEQ ID NO: 7642 - protein, 17 aa, Artificial Sequence
  Synthetically generated peptide
  VARIANT (1)..(17): Xaa = Any Amino Acid
CCEXLACXNXPAXCTGA

SEQ ID NO: 7643 - protein, 17 aa, Artificial Sequence
  Synthetically generated peptide
  VARIANT (1)..(17): Xaa = Any Amino Acid
CCEXLACXNXPACXTGA

SEQ ID NO: 7644 - protein, 17 aa, Artificial Sequence
  Synthetically generated peptide
  VARIANT (1)..(17): Xaa = Any Amino Acid
CCEXLACXNXPACTXGA

SEQ ID NO: 7645 - protein, 17 aa, Artificial Sequence
  Synthetically generated peptide
  VARIANT (1)..(17): Xaa = Any Amino Acid
CCEXLACXNXPACTGXA

SEQ ID NO: 7646 - protein, 16 aa, Artificial Sequence
  Synthetically generated peptide
  VARIANT (1)..(16): Xaa = Any Amino Acid
CCEXLACXNPXACTGA

SEQ ID NO: 7647 - protein, 17 aa, Artificial Sequence
  Synthetically generated peptide
  VARIANT (1)..(17): Xaa = Any Amino Acid
CCEXLACXNPXXACTGA

SEQ ID NO: 7648 - protein, 17 aa, Artificial Sequence
  Synthetically generated peptide
  VARIANT (1)..(17): Xaa = Any Amino Acid
CCEXLACXNPXAXCTGA

SEQ ID NO: 7649 - protein, 17 aa, Artificial Sequence
  Synthetically generated peptide
  VARIANT (1)..(17): Xaa = Any Amino Acid
CCEXLACXNPXACXTGA

SEQ ID NO: 7650 - protein, 17 aa, Artificial Sequence
  Synthetically generated peptide
  VARIANT (1)..(17): Xaa = Any Amino Acid
CCEXLACXNPXACTXGA

SEQ ID NO: 7651 - protein, 17 aa, Artificial Sequence
  Synthetically generated peptide
  VARIANT (1)..(17): Xaa = Any Amino Acid
CCEXLACXNPXACTGXA

SEQ ID NO: 7652 - protein, 16 aa, Artificial Sequence
  Synthetically generated peptide
  VARIANT (1)..(16): Xaa = Any Amino Acid
CCEXLACXNPAXCTGA

SEQ ID NO: 7653 - protein, 17 aa, Artificial Sequence
  Synthetically generated peptide
  VARIANT (1)..(17): Xaa = Any Amino Acid
CCEXLACXNPAXXCTGA

SEQ ID NO: 7654 - protein, 17 aa, Artificial Sequence
  Synthetically generated peptide
  VARIANT (1)..(17): Xaa = Any Amino Acid
CCEXLACXNPAXCXTGA

SEQ ID NO: 7655 - protein, 17 aa, Artificial Sequence
  Synthetically generated peptide
  VARIANT (1)..(17): Xaa = Any Amino Acid
CCEXLACXNPAXCTXGA

SEQ ID NO: 7656 - protein, 17 aa, Artificial Sequence
  Synthetically generated peptide
  VARIANT (1)..(17): Xaa = Any Amino Acid
CCEXLACXNPAXCTGXA

SEQ ID NO: 7657 - protein, 16 aa, Artificial Sequence
  Synthetically generated peptide
  VARIANT (1)..(16): Xaa = Any Amino Acid
CCEXLACXNPACXTGA

SEQ ID NO: 7658 - protein, 17 aa, Artificial Sequence
  Synthetically generated peptide
  VARIANT (1)..(17): Xaa = Any Amino Acid
CCEXLACXNPACXXTGA

SEQ ID NO: 7659 - protein, 17 aa, Artificial Sequence
  Synthetically generated peptide
  VARIANT (1)..(17): Xaa = Any Amino Acid
CCEXLACXNPACXTXGA

SEQ ID NO: 7660 - protein, 17 aa, Artificial Sequence
  Synthetically generated peptide
  VARIANT (1)..(17): Xaa = Any Amino Acid
CCEXLACXNPACXTGXA

SEQ ID NO: 7661 - protein, 16 aa, Artificial Sequence
  Synthetically generated peptide
  VARIANT (1)..(16): Xaa = Any Amino Acid
CCEXLACXNPACTXGA

SEQ ID NO: 7662 - protein, 17 aa, Artificial Sequence
  Synthetically generated peptide
  VARIANT (1)..(17): Xaa = Any Amino Acid
CCEXLACXNPACTXXGA

SEQ ID NO: 7663 - protein, 17 aa, Artificial Sequence
  Synthetically generated peptide
  VARIANT (1)..(17): Xaa = Any Amino Acid
CCEXLACXNPACTXGXA

SEQ ID NO: 7664 - protein, 16 aa, Artificial Sequence
  Synthetically generated peptide
  VARIANT (1)..(16): Xaa = Any Amino Acid
CCEXLACXNPACTGXA

SEQ ID NO: 7665 - protein, 17 aa, Artificial Sequence
  Synthetically generated peptide
  VARIANT (1)..(17): Xaa = Any Amino Acid
CCEXLACXNPACTGXXA

SEQ ID NO: 7666 - protein, 15 aa, Artificial Sequence
  Synthetically generated peptide
  VARIANT (1)..(15): Xaa = Any Amino Acid
CCEXLACNXPACTGA

SEQ ID NO: 7667 - protein, 16 aa, Artificial Sequence
  Synthetically generated peptide
  VARIANT (1)..(16): Xaa = Any Amino Acid
CCEXLACNXXPACTGA

SEQ ID NO: 7668 - protein, 17 aa, Artificial Sequence
  Synthetically generated peptide
  VARIANT (1)..(17): Xaa = Any Amino Acid
CCEXLACNXXXPACTGA

SEQ ID NO: 7669 - protein, 17 aa, Artificial Sequence
  Synthetically generated peptide
  VARIANT (1)..(17): Xaa = Any Amino Acid
CCEXLACNXXPXACTGA

SEQ ID NO: 7670 - protein, 17 aa, Artificial Sequence
  Synthetically generated peptide
  VARIANT (1)..(17): Xaa = Any Amino Acid
CCEXLACNXXPAXCTGA

SEQ ID NO: 7671 - protein, 17 aa, Artificial Sequence
  Synthetically generated peptide
  VARIANT (1)..(17): Xaa = Any Amino Acid
CCEXLACNXXPACXTGA

SEQ ID NO: 7672 - protein, 17 aa, Artificial Sequence
  Synthetically generated peptide
  VARIANT (1)..(17): Xaa = Any Amino Acid
CCEXLACNXXPACTXGA

SEQ ID NO: 7673 - protein, 17 aa, Artificial Sequence
  Synthetically generated peptide
  VARIANT (1)..(17): Xaa = Any Amino Acid
CCEXLACNXXPACTGXA

SEQ ID NO: 7674 - protein, 16 aa, Artificial Sequence
  Synthetically generated peptide
  VARIANT (1)..(16): Xaa = Any Amino Acid
CCEXLACNXPXACTGA

SEQ ID NO: 7675 - protein, 17 aa, Artificial Sequence
  Synthetically generated peptide
  VARIANT (1)..(17): Xaa = Any Amino Acid
CCEXLACNXPXXACTGA

SEQ ID NO: 7676 - protein, 17 aa, Artificial Sequence
  Synthetically generated peptide
  VARIANT (1)..(17): Xaa = Any Amino Acid
CCEXLACNXPXAXCTGA

SEQ ID NO: 7677 - protein, 17 aa, Artificial Sequence
  Synthetically generated peptide
  VARIANT (1)..(17): Xaa = Any Amino Acid
CCEXLACNXPXACXTGA

SEQ ID NO: 7678 - protein, 17 aa, Artificial Sequence
  Synthetically generated peptide
  VARIANT (1)..(17): Xaa = Any Amino Acid
CCEXLACNXPXACTXGA

SEQ ID NO: 7679 - protein, 17 aa, Artificial Sequence
  Synthetically generated peptide
  VARIANT (1)..(17): Xaa = Any Amino Acid
CCEXLACNXPXACTGXA

SEQ ID NO: 7680 - protein, 16 aa, Artificial Sequence
  Synthetically generated peptide
  VARIANT (1)..(16): Xaa = Any Amino Acid
CCEXLACNXPAXCTGA

SEQ ID NO: 7681 - protein, 17 aa, Artificial Sequence
  Synthetically generated peptide
  VARIANT (1)..(17): Xaa = Any Amino Acid
CCEXLACNXPAXXCTGA

SEQ ID NO: 7682 - protein, 17 aa, Artificial Sequence
  Synthetically generated peptide
  VARIANT (1)..(17): Xaa = Any Amino Acid
CCEXLACNXPAXCXTGA

SEQ ID NO: 7683 - protein, 17 aa, Artificial Sequence
  Synthetically generated peptide
  VARIANT (1)..(17): Xaa = Any Amino Acid
CCEXLACNXPAXCTXGA

SEQ ID NO: 7684 - protein, 17 aa, Artificial Sequence
  Synthetically generated peptide
  VARIANT (1)..(17): Xaa = Any Amino Acid
CCEXLACNXPAXCTGXA

SEQ ID NO: 7685 - protein, 16 aa, Artificial Sequence
  Synthetically generated peptide
  VARIANT (1)..(16): Xaa = Any Amino Acid
CCEXLACNXPACXTGA

SEQ ID NO: 7686 - protein, 17 aa, Artificial Sequence
  Synthetically generated peptide
  VARIANT (1)..(17): Xaa = Any Amino Acid
CCEXLACNXPACXXTGA

SEQ ID NO: 7687 - protein, 17 aa, Artificial Sequence
  Synthetically generated peptide
  VARIANT (1)..(17): Xaa = Any Amino Acid
CCEXLACNXPACXTXGA

SEQ ID NO: 7688 - protein, 17 aa, Artificial Sequence
  Synthetically generated peptide
  VARIANT (1)..(17): Xaa = Any Amino Acid
CCEXLACNXPACXTGXA

SEQ ID NO: 7689 - protein, 16 aa, Artificial Sequence
  Synthetically generated peptide
  VARIANT (1)..(16): Xaa = Any Amino Acid
CCEXLACNXPACTXGA

SEQ ID NO: 7690 - protein, 17 aa, Artificial Sequence
  Synthetically generated peptide
  VARIANT (1)..(17): Xaa = Any Amino Acid
CCEXLACNXPACTXXGA

SEQ ID NO: 7691 - protein, 17 aa, Artificial Sequence
  Synthetically generated peptide
  VARIANT (1)..(17): Xaa = Any Amino Acid
CCEXLACNXPACTXGXA

SEQ ID NO: 7692 - protein, 16 aa, Artificial Sequence
  Synthetically generated peptide
  VARIANT (1)..(16): Xaa = Any Amino Acid
CCEXLACNXPACTGXA

SEQ ID NO: 7693 - protein, 17 aa, Artificial Sequence
  Synthetically generated peptide
  VARIANT (1)..(17): Xaa = Any Amino Acid
CCEXLACNXPACTGXXA

SEQ ID NO: 7694 - protein, 15 aa, Artificial Sequence
  Synthetically generated peptide
  VARIANT (1)..(15): Xaa = Any Amino Acid
CCEXLACNPXACTGA

SEQ ID NO: 7695 - protein, 16 aa, Artificial Sequence
  Synthetically generated peptide
  VARIANT (1)..(16): Xaa = Any Amino Acid
CCEXLACNPXXACTGA

SEQ ID NO: 7696 - protein, 17 aa, Artificial Sequence
  Synthetically generated peptide
  VARIANT (1)..(17): Xaa = Any Amino Acid
CCEXLACNPXXXACTGA

SEQ ID NO: 7697 - protein, 17 aa, Artificial Sequence
  Synthetically generated peptide
  VARIANT (1)..(17): Xaa = Any Amino Acid
CCEXLACNPXXAXCTGA

SEQ ID NO: 7698 - protein, 17 aa, Artificial Sequence
  Synthetically generated peptide
  VARIANT (1)..(17): Xaa = Any Amino Acid
CCEXLACNPXXACXTGA

SEQ ID NO: 7699 - protein, 17 aa, Artificial Sequence
  Synthetically generated peptide
  VARIANT (1)..(17): Xaa = Any Amino Acid
CCEXLACNPXXACTXGA

SEQ ID NO: 7700 - protein, 17 aa, Artificial Sequence
  Synthetically generated peptide
  VARIANT (1)..(17): Xaa = Any Amino Acid
CCEXLACNPXXACTGXA

SEQ ID NO: 7701 - protein, 16 aa, Artificial Sequence
  Synthetically generated peptide
  VARIANT (1)..(16): Xaa = Any Amino Acid
CCEXLACNPXAXCTGA

SEQ ID NO: 7702 - protein, 17 aa, Artificial Sequence
  Synthetically generated peptide
  VARIANT (1)..(17): Xaa = Any Amino Acid
CCEXLACNPXAXXCTGA

SEQ ID NO: 7703 - protein, 17 aa, Artificial Sequence
  Synthetically generated peptide
  VARIANT (1)..(17): Xaa = Any Amino Acid
CCEXLACNPXAXCXTGA

SEQ ID NO: 7704 - protein, 17 aa, Artificial Sequence
  Synthetically generated peptide
  VARIANT (1)..(17): Xaa = Any Amino Acid
CCEXLACNPXAXCTXGA

SEQ ID NO: 7705 - protein, 17 aa, Artificial Sequence
  Synthetically generated peptide
  VARIANT (1)..(17): Xaa = Any Amino Acid
CCEXLACNPXAXCTGXA

SEQ ID NO: 7706 - protein, 16 aa, Artificial Sequence
  Synthetically generated peptide
  VARIANT (1)..(16): Xaa = Any Amino Acid
CCEXLACNPXACXTGA

SEQ ID NO: 7707 - protein, 17 aa, Artificial Sequence
  Synthetically generated peptide
  VARIANT (1)..(17): Xaa = Any Amino Acid
CCEXLACNPXACXXTGA

SEQ ID NO: 7708 - protein, 17 aa, Artificial Sequence
  Synthetically generated peptide
  VARIANT (1)..(17): Xaa = Any Amino Acid
CCEXLACNPXACXTXGA

SEQ ID NO: 7709 - protein, 17 aa, Artificial Sequence
  Synthetically generated peptide
  VARIANT (1)..(17): Xaa = Any Amino Acid
CCEXLACNPXACXTGXA

SEQ ID NO: 7710 - protein, 16 aa, Artificial Sequence
  Synthetically generated peptide
  VARIANT (1)..(16): Xaa = Any Amino Acid
CCEXLACNPXACTXGA

SEQ ID NO: 7711 - protein, 17 aa, Artificial Sequence
  Synthetically generated peptide
  VARIANT (1)..(17): Xaa = Any Amino Acid
CCEXLACNPXACTXXGA

SEQ ID NO: 7712 - protein, 17 aa, Artificial Sequence
  Synthetically generated peptide
  VARIANT (1)..(17): Xaa = Any Amino Acid
CCEXLACNPXACTXGXA

SEQ ID NO: 7713 - protein, 16 aa, Artificial Sequence
  Synthetically generated peptide
  VARIANT (1)..(16): Xaa = Any Amino Acid
CCEXLACNPXACTGXA

SEQ ID NO: 7714 - protein, 17 aa, Artificial Sequence
  Synthetically generated peptide
  VARIANT (1)..(17): Xaa = Any Amino Acid
CCEXLACNPXACTGXXA

SEQ ID NO: 7715 - protein, 15 aa, Artificial Sequence
  Synthetically generated peptide
  VARIANT (1)..(15): Xaa = Any Amino Acid
CCEXLACNPAXCTGA

SEQ ID NO: 7716 - protein, 16 aa, Artificial Sequence
  Synthetically generated peptide
  VARIANT (1)..(16): Xaa = Any Amino Acid
CCEXLACNPAXXCTGA

SEQ ID NO: 7717 - protein, 17 aa, Artificial Sequence
  Synthetically generated peptide
  VARIANT (1)..(17): Xaa = Any Amino Acid
CCEXLACNPAXXXCTGA

SEQ ID NO: 7718 - protein, 17 aa, Artificial Sequence
  Synthetically generated peptide
  VARIANT (1)..(17): Xaa = Any Amino Acid
CCEXLACNPAXXCXTGA

SEQ ID NO: 7719 - protein, 17 aa, Artificial Sequence
  Synthetically generated peptide
  VARIANT (1)..(17): Xaa = Any Amino Acid
CCEXLACNPAXXCTXGA

SEQ ID NO: 7720 - protein, 17 aa, Artificial Sequence
  Synthetically generated peptide
  VARIANT (1)..(17): Xaa = Any Amino Acid
CCEXLACNPAXXCTGXA

SEQ ID NO: 7721 - protein, 16 aa, Artificial Sequence
  Synthetically generated peptide
  VARIANT (1)..(16): Xaa = Any Amino Acid
CCEXLACNPAXCXTGA

SEQ ID NO: 7722 - protein, 17 aa, Artificial Sequence
  Synthetically generated peptide
  VARIANT (1)..(17): Xaa = Any Amino Acid
CCEXLACNPAXCXXTGA

SEQ ID NO: 7723 - protein, 17 aa, Artificial Sequence
  Synthetically generated peptide
  VARIANT (1)..(17): Xaa = Any Amino Acid
CCEXLACNPAXCXTXGA

SEQ ID NO: 7724 - protein, 17 aa, Artificial Sequence
  Synthetically generated peptide
  VARIANT (1)..(17): Xaa = Any Amino Acid
CCEXLACNPAXCXTGXA

SEQ ID NO: 7725 - protein, 16 aa, Artificial Sequence
  Synthetically generated peptide
  VARIANT (1)..(16): Xaa = Any Amino Acid
CCEXLACNPAXCTXGA

SEQ ID NO: 7726 - protein, 17 aa, Artificial Sequence
  Synthetically generated peptide
  VARIANT (1)..(17): Xaa = Any Amino Acid
CCEXLACNPAXCTXXGA

SEQ ID NO: 7727 - protein, 17 aa, Artificial Sequence
  Synthetically generated peptide
  VARIANT (1)..(17): Xaa = Any Amino Acid
CCEXLACNPAXCTXGXA

SEQ ID NO: 7728 - protein, 16 aa, Artificial Sequence
  Synthetically generated peptide
  VARIANT (1)..(16): Xaa = Any Amino Acid
CCEXLACNPAXCTGXA

SEQ ID NO: 7729 - protein, 17 aa, Artificial Sequence
  Synthetically generated peptide
  VARIANT (1)..(17): Xaa = Any Amino Acid
CCEXLACNPAXCTGXXA

SEQ ID NO: 7730 - protein, 15 aa, Artificial Sequence
  Synthetically generated peptide
  VARIANT (1)..(15): Xaa = Any Amino Acid
CCEXLACNPACXTGA

SEQ ID NO: 7731 - protein, 16 aa, Artificial Sequence
  Synthetically generated peptide
  VARIANT (1)..(16): Xaa = Any Amino Acid
CCEXLACNPACXXTGA

SEQ ID NO: 7732 - protein, 17 aa, Artificial Sequence
  Synthetically generated peptide
  VARIANT (1)..(17): Xaa = Any Amino Acid
CCEXLACNPACXXXTGA

SEQ ID NO: 7733 - protein, 17 aa, Artificial Sequence
  Synthetically generated peptide
  VARIANT (1)..(17): Xaa = Any Amino Acid
CCEXLACNPACXXTXGA

SEQ ID NO: 7734 - protein, 17 aa, Artificial Sequence
  Synthetically generated peptide
  VARIANT (1)..(17): Xaa = Any Amino Acid
CCEXLACNPACXXTGXA

SEQ ID NO: 7735 - protein, 16 aa, Artificial Sequence
  Synthetically generated peptide
  VARIANT (1)..(16): Xaa = Any Amino Acid
CCEXLACNPACXTXGA

SEQ ID NO: 7736 - protein, 17 aa, Artificial Sequence
  Synthetically generated peptide
  VARIANT (1)..(17): Xaa = Any Amino Acid
CCEXLACNPACXTXXGA

SEQ ID NO: 7737 - protein, 17 aa, Artificial Sequence
  Synthetically generated peptide
  VARIANT (1)..(17): Xaa = Any Amino Acid
CCEXLACNPACXTXGXA

SEQ ID NO: 7738 - protein, 16 aa, Artificial Sequence
  Synthetically generated peptide
  VARIANT (1)..(16): Xaa = Any Amino Acid
CCEXLACNPACXTGXA

SEQ ID NO: 7739 - protein, 17 aa, Artificial Sequence
  Synthetically generated peptide
  VARIANT (1)..(17): Xaa = Any Amino Acid
CCEXLACNPACXTGXXA

SEQ ID NO: 7740 - protein, 15 aa, Artificial Sequence
  Synthetically generated peptide
  VARIANT (1)..(15): Xaa = Any Amino Acid
CCEXLACNPACTXGA

SEQ ID NO: 7741 - protein, 16 aa, Artificial Sequence
  Synthetically generated peptide
  VARIANT (1)..(16): Xaa = Any Amino Acid
CCEXLACNPACTXXGA

SEQ ID NO: 7742 - protein, 17 aa, Artificial Sequence
  Synthetically generated peptide
  VARIANT (1)..(17): Xaa = Any Amino Acid
CCEXLACNPACTXXXGA

SEQ ID NO: 7743 - protein, 17 aa, Artificial Sequence
  Synthetically generated peptide
  VARIANT (1)..(17): Xaa = Any Amino Acid
CCEXLACNPACTXXGXA

SEQ ID NO: 7744 - protein, 16 aa, Artificial Sequence
  Synthetically generated peptide
  VARIANT (1)..(16): Xaa = Any Amino Acid
CCEXLACNPACTXGXA

SEQ ID NO: 7745 - protein, 17 aa, Artificial Sequence
  Synthetically generated peptide
  VARIANT (1)..(17): Xaa = Any Amino Acid
CCEXLACNPACTXGXXA

SEQ ID NO: 7746 - protein, 15 aa, Artificial Sequence
  Synthetically generated peptide
  VARIANT (1)..(15): Xaa = Any Amino Acid
CCEXLACNPACTGXA

SEQ ID NO: 7747 - protein, 16 aa, Artificial Sequence
  Synthetically generated peptide
  VARIANT (1)..(16): Xaa = Any Amino Acid
CCEXLACNPACTGXXA

SEQ ID NO: 7748 - protein, 17 aa, Artificial Sequence
  Synthetically generated peptide
  VARIANT (1)..(17): Xaa = Any Amino Acid
CCEXLACNPACTGXXXA

SEQ ID NO: 7749 - protein, 14 aa, Artificial Sequence
  Synthetically generated peptide
  VARIANT (1)..(14): Xaa = Any Amino Acid
CCELXACNPACTGA

SEQ ID NO: 7750 - protein, 15 aa, Artificial Sequence
  Synthetically generated peptide
  VARIANT (1)..(15): Xaa = Any Amino Acid
CCELXXACNPACTGA

SEQ ID NO: 7751 - protein, 16 aa, Artificial Sequence
  Synthetically generated peptide
  VARIANT (1)..(16): Xaa = Any Amino Acid
CCELXXXACNPACTGA

SEQ ID NO: 7752 - protein, 17 aa, Artificial Sequence
  Synthetically generated peptide
  VARIANT (1)..(17): Xaa = Any Amino Acid
CCELXXXXACNPACTGA

SEQ ID NO: 7753 - protein, 17 aa, Artificial Sequence
  Synthetically generated peptide
  VARIANT (1)..(17): Xaa = Any Amino Acid
CCELXXXACXNPACTGA

SEQ ID NO: 7754 - protein, 17 aa, Artificial Sequence
  Synthetically generated peptide
  VARIANT (1)..(17): Xaa = Any Amino Acid
CCELXXXACNXPACTGA

SEQ ID NO: 7755 - protein, 17 aa, Artificial Sequence
  Synthetically generated peptide
  VARIANT (1)..(17): Xaa = Any Amino Acid
CCELXXXACNPXACTGA

SEQ ID NO: 7756 - protein, 17 aa, Artificial Sequence
  Synthetically generated peptide
  VARIANT (1)..(17): Xaa = Any Amino Acid
CCELXXXACNPAXCTGA

SEQ ID NO: 7757 - protein, 17 aa, Artificial Sequence
  Synthetically generated peptide
  VARIANT (1)..(17): Xaa = Any Amino Acid
CCELXXXACNPACXTGA

SEQ ID NO: 7758 - protein, 17 aa, Artificial Sequence
  Synthetically generated peptide
  VARIANT (1)..(17): Xaa = Any Amino Acid
CCELXXXACNPACTXGA

SEQ ID NO: 7759 - protein, 17 aa, Artificial Sequence
  Synthetically generated peptide
  VARIANT (1)..(17): Xaa = Any Amino Acid
CCELXXXACNPACTGXA

SEQ ID NO: 7760 - protein, 16 aa, Artificial Sequence
  Synthetically generated peptide
  VARIANT (1)..(16): Xaa = Any Amino Acid
CCELXXACXNPACTGA

SEQ ID NO: 7761 - protein, 17 aa, Artificial Sequence
  Synthetically generated peptide
  VARIANT (1)..(17): Xaa = Any Amino Acid
CCELXXACXXNPACTGA

SEQ ID NO: 7762 - protein, 17 aa, Artificial Sequence
  Synthetically generated peptide
  VARIANT (1)..(17): Xaa = Any Amino Acid
CCELXXACXNXPACTGA

SEQ ID NO: 7763 - protein, 17 aa, Artificial Sequence
  Synthetically generated peptide
  VARIANT (1)..(17): Xaa = Any Amino Acid
CCELXXACXNPXACTGA

SEQ ID NO: 7764 - protein, 17 aa, Artificial Sequence
  Synthetically generated peptide
  VARIANT (1)..(17): Xaa = Any Amino Acid
CCELXXACXNPAXCTGA

SEQ ID NO: 7765 - protein, 17 aa, Artificial Sequence
  Synthetically generated peptide
  VARIANT (1)..(17): Xaa = Any Amino Acid
CCELXXACXNPACXTGA

SEQ ID NO: 7766 - protein, 17 aa, Artificial Sequence
  Synthetically generated peptide
  VARIANT (1)..(17): Xaa = Any Amino Acid
CCELXXACXNPACTXGA

SEQ ID NO: 7767 - protein, 17 aa, Artificial Sequence
  Synthetically generated peptide
  VARIANT (1)..(17): Xaa = Any Amino Acid
CCELXXACXNPACTGXA

SEQ ID NO: 7768 - protein, 16 aa, Artificial Sequence
  Synthetically generated peptide
  VARIANT (1)..(16): Xaa = Any Amino Acid
CCELXXACNXPACTGA

SEQ ID NO: 7769 - protein, 17 aa, Artificial Sequence
  Synthetically generated peptide
  VARIANT (1)..(17): Xaa = Any Amino Acid
CCELXXACNXXPACTGA

SEQ ID NO: 7770 - protein, 17 aa, Artificial Sequence
  Synthetically generated peptide
  VARIANT (1)..(17): Xaa = Any Amino Acid
CCELXXACNXPXACTGA

SEQ ID NO: 7771 - protein, 17 aa, Artificial Sequence
  Synthetically generated peptide
  VARIANT (1)..(17): Xaa = Any Amino Acid
CCELXXACNXPAXCTGA

SEQ ID NO: 7772 - protein, 17 aa, Artificial Sequence
  Synthetically generated peptide
  VARIANT (1)..(17): Xaa = Any Amino Acid
CCELXXACNXPACXTGA

SEQ ID NO: 7773 - protein, 17 aa, Artificial Sequence
  Synthetically generated peptide
  VARIANT (1)..(17): Xaa = Any Amino Acid
CCELXXACNXPACTXGA

SEQ ID NO: 7774 - protein, 17 aa, Artificial Sequence
  Synthetically generated peptide
  VARIANT (1)..(17): Xaa = Any Amino Acid
CCELXXACNXPACTGXA

SEQ ID NO: 7775 - protein, 16 aa, Artificial Sequence
  Synthetically generated peptide
  VARIANT (1)..(16): Xaa = Any Amino Acid
CCELXXACNPXACTGA

SEQ ID NO: 7776 - protein, 17 aa, Artificial Sequence
  Synthetically generated peptide
  VARIANT (1)..(17): Xaa = Any Amino Acid
CCELXXACNPXXACTGA

SEQ ID NO: 7777 - protein, 17 aa, Artificial Sequence
  Synthetically generated peptide
  VARIANT (1)..(17): Xaa = Any Amino Acid
CCELXXACNPXAXCTGA

SEQ ID NO: 7778 - protein, 17 aa, Artificial Sequence
  Synthetically generated peptide
  VARIANT (1)..(17): Xaa = Any Amino Acid
CCELXXACNPXACXTGA

SEQ ID NO: 7779 - protein, 17 aa, Artificial Sequence
  Synthetically generated peptide
  VARIANT (1)..(17): Xaa = Any Amino Acid
CCELXXACNPXACTXGA

SEQ ID NO: 7780 - protein, 17 aa, Artificial Sequence
  Synthetically generated peptide
  VARIANT (1)..(17): Xaa = Any Amino Acid
CCELXXACNPXACTGXA

SEQ ID NO: 7781 - protein, 16 aa, Artificial Sequence
  Synthetically generated peptide
  VARIANT (1)..(16): Xaa = Any Amino Acid
CCELXXACNPAXCTGA

SEQ ID NO: 7782 - protein, 17 aa, Artificial Sequence
  Synthetically generated peptide
  VARIANT (1)..(17): Xaa = Any Amino Acid
CCELXXACNPAXXCTGA

SEQ ID NO: 7783 - protein, 17 aa, Artificial Sequence
  Synthetically generated peptide
  VARIANT (1)..(17): Xaa = Any Amino Acid
CCELXXACNPAXCXTGA

SEQ ID NO: 7784 - protein, 17 aa, Artificial Sequence
  Synthetically generated peptide
  VARIANT (1)..(17): Xaa = Any Amino Acid
CCELXXACNPAXCTXGA

SEQ ID NO: 7785 - protein, 17 aa, Artificial Sequence
  Synthetically generated peptide
  VARIANT (1)..(17): Xaa = Any Amino Acid
CCELXXACNPAXCTGXA

SEQ ID NO: 7786 - protein, 16 aa, Artificial Sequence
  Synthetically generated peptide
  VARIANT (1)..(16): Xaa = Any Amino Acid
CCELXXACNPACXTGA

SEQ ID NO: 7787 - protein, 17 aa, Artificial Sequence
  Synthetically generated peptide
  VARIANT (1)..(17): Xaa = Any Amino Acid
CCELXXACNPACXXTGA

SEQ ID NO: 7788 - protein, 17 aa, Artificial Sequence
  Synthetically generated peptide
  VARIANT (1)..(17): Xaa = Any Amino Acid
CCELXXACNPACXTXGA

SEQ ID NO: 7789 - protein, 17 aa, Artificial Sequence
  Synthetically generated peptide
  VARIANT (1)..(17): Xaa = Any Amino Acid
CCELXXACNPACXTGXA

SEQ ID NO: 7790 - protein, 16 aa, Artificial Sequence
  Synthetically generated peptide
  VARIANT (1)..(16): Xaa = Any Amino Acid
CCELXXACNPACTXGA

SEQ ID NO: 7791 - protein, 17 aa, Artificial Sequence
  Synthetically generated peptide
  VARIANT (1)..(17): Xaa = Any Amino Acid
CCELXXACNPACTXXGA

SEQ ID NO: 7792 - protein, 17 aa, Artificial Sequence
  Synthetically generated peptide
  VARIANT (1)..(17): Xaa = Any Amino Acid
CCELXXACNPACTXGXA

SEQ ID NO: 7793 - protein, 16 aa, Artificial Sequence
  Synthetically generated peptide
  VARIANT (1)..(16): Xaa = Any Amino Acid
CCELXXACNPACTGXA

SEQ ID NO: 7794 - protein, 17 aa, Artificial Sequence
  Synthetically generated peptide
  VARIANT (1)..(17): Xaa = Any Amino Acid
CCELXXACNPACTGXXA

SEQ ID NO: 7795 - protein, 15 aa, Artificial Sequence
  Synthetically generated peptide
  VARIANT (1)..(15): Xaa = Any Amino Acid
CCELXACXNPACTGA

SEQ ID NO: 7796 - protein, 16 aa, Artificial Sequence
  Synthetically generated peptide
  VARIANT (1)..(16): Xaa = Any Amino Acid
CCELXACXXNPACTGA

SEQ ID NO: 7797 - protein, 17 aa, Artificial Sequence
  Synthetically generated peptide
  VARIANT (1)..(17): Xaa = Any Amino Acid
CCELXACXXXNPACTGA

SEQ ID NO: 7798 - protein, 17 aa, Artificial Sequence
  Synthetically generated peptide
  VARIANT (1)..(17): Xaa = Any Amino Acid
CCELXACXXNXPACTGA

SEQ ID NO: 7799 - protein, 17 aa, Artificial Sequence
  Synthetically generated peptide
  VARIANT (1)..(17): Xaa = Any Amino Acid
CCELXACXXNPXACTGA

SEQ ID NO: 7800 - protein, 17 aa, Artificial Sequence
  Synthetically generated peptide
  VARIANT (1)..(17): Xaa = Any Amino Acid
CCELXACXXNPAXCTGA

SEQ ID NO: 7801 - protein, 17 aa, Artificial Sequence
  Synthetically generated peptide
  VARIANT (1)..(17): Xaa = Any Amino Acid
CCELXACXXNPACXTGA

SEQ ID NO: 7802 - protein, 17 aa, Artificial Sequence
  Synthetically generated peptide
  VARIANT (1)..(17): Xaa = Any Amino Acid
CCELXACXXNPACTXGA

SEQ ID NO: 7803 - protein, 17 aa, Artificial Sequence
  Synthetically generated peptide
  VARIANT (1)..(17): Xaa = Any Amino Acid
CCELXACXXNPACTGXA

SEQ ID NO: 7804 - protein, 16 aa, Artificial Sequence
  Synthetically generated peptide
  VARIANT (1)..(16): Xaa = Any Amino Acid
CCELXACXNXPACTGA

SEQ ID NO: 7805 - protein, 17 aa, Artificial Sequence
  Synthetically generated peptide
  VARIANT (1)..(17): Xaa = Any Amino Acid
CCELXACXNXXPACTGA

SEQ ID NO: 7806 - protein, 17 aa, Artificial Sequence
  Synthetically generated peptide
  VARIANT (1)..(17): Xaa = Any Amino Acid
CCELXACXNXPXACTGA

SEQ ID NO: 7807 - protein, 17 aa, Artificial Sequence
  Synthetically generated peptide
  VARIANT (1)..(17): Xaa = Any Amino Acid
CCELXACXNXPAXCTGA

SEQ ID NO: 7808 - protein, 17 aa, Artificial Sequence
  Synthetically generated peptide
  VARIANT (1)..(17): Xaa = Any Amino Acid
CCELXACXNXPACXTGA

SEQ ID NO: 7809 - protein, 17 aa, Artificial Sequence
  Synthetically generated peptide
  VARIANT (1)..(17): Xaa = Any Amino Acid
CCELXACXNXPACTXGA

SEQ ID NO: 7810 - protein, 17 aa, Artificial Sequence
  Synthetically generated peptide
  VARIANT (1)..(17): Xaa = Any Amino Acid
CCELXACXNXPACTGXA

SEQ ID NO: 7811 - protein, 16 aa, Artificial Sequence
  Synthetically generated peptide
  VARIANT (1)..(16): Xaa = Any Amino Acid
CCELXACXNPXACTGA

SEQ ID NO: 7812 - protein, 17 aa, Artificial Sequence
  Synthetically generated peptide
  VARIANT (1)..(17): Xaa = Any Amino Acid
CCELXACXNPXXACTGA

SEQ ID NO: 7813 - protein, 17 aa, Artificial Sequence
  Synthetically generated peptide
  VARIANT (1)..(17): Xaa = Any Amino Acid
CCELXACXNPXAXCTGA

SEQ ID NO: 7814 - protein, 17 aa, Artificial Sequence
  Synthetically generated peptide
  VARIANT (1)..(17): Xaa = Any Amino Acid
CCELXACXNPXACXTGA

SEQ ID NO: 7815 - protein, 17 aa, Artificial Sequence
  Synthetically generated peptide
  VARIANT (1)..(17): Xaa = Any Amino Acid
CCELXACXNPXACTXGA

SEQ ID NO: 7816 - protein, 17 aa, Artificial Sequence
  Synthetically generated peptide
  VARIANT (1)..(17): Xaa = Any Amino Acid
CCELXACXNPXACTGXA

SEQ ID NO: 7817 - protein, 16 aa, Artificial Sequence
  Synthetically generated peptide
  VARIANT (1)..(16): Xaa = Any Amino Acid
CCELXACXNPAXCTGA

SEQ ID NO: 7818 - protein, 17 aa, Artificial Sequence
  Synthetically generated peptide
  VARIANT (1)..(17): Xaa = Any Amino Acid
CCELXACXNPAXXCTGA

SEQ ID NO: 7819 - protein, 17 aa, Artificial Sequence
  Synthetically generated peptide
  VARIANT (1)..(17): Xaa = Any Amino Acid
CCELXACXNPAXCXTGA

SEQ ID NO: 7820 - protein, 17 aa, Artificial Sequence
  Synthetically generated peptide
  VARIANT (1)..(17): Xaa = Any Amino Acid
CCELXACXNPAXCTXGA

SEQ ID NO: 7821 - protein, 17 aa, Artificial Sequence
  Synthetically generated peptide
  VARIANT (1)..(17): Xaa = Any Amino Acid
CCELXACXNPAXCTGXA

SEQ ID NO: 7822 - protein, 16 aa, Artificial Sequence
  Synthetically generated peptide
  VARIANT (1)..(16): Xaa = Any Amino Acid
CCELXACXNPACXTGA

SEQ ID NO: 7823 - protein, 17 aa, Artificial Sequence
  Synthetically generated peptide
  VARIANT (1)..(17): Xaa = Any Amino Acid
CCELXACXNPACXXTGA

SEQ ID NO: 7824 - protein, 17 aa, Artificial Sequence
  Synthetically generated peptide
  VARIANT (1)..(17): Xaa = Any Amino Acid
CCELXACXNPACXTXGA

SEQ ID NO: 7825 - protein, 17 aa, Artificial Sequence
  Synthetically generated peptide
  VARIANT (1)..(17): Xaa = Any Amino Acid
CCELXACXNPACXTGXA

SEQ ID NO: 7826 - protein, 16 aa, Artificial Sequence
  Synthetically generated peptide
  VARIANT (1)..(16): Xaa = Any Amino Acid
CCELXACXNPACTXGA

SEQ ID NO: 7827 - protein, 17 aa, Artificial Sequence
  Synthetically generated peptide
  VARIANT (1)..(17): Xaa = Any Amino Acid
CCELXACXNPACTXXGA

SEQ ID NO: 7828 - protein, 17 aa, Artificial Sequence
  Synthetically generated peptide
  VARIANT (1)..(17): Xaa = Any Amino Acid
CCELXACXNPACTXGXA

SEQ ID NO: 7829 - protein, 16 aa, Artificial Sequence
  Synthetically generated peptide
  VARIANT (1)..(16): Xaa = Any Amino Acid
CCELXACXNPACTGXA

SEQ ID NO: 7830 - protein, 17 aa, Artificial Sequence
  Synthetically generated peptide
  VARIANT (1)..(17): Xaa = Any Amino Acid
CCELXACXNPACTGXXA

SEQ ID NO: 7831 - protein, 15 aa, Artificial Sequence
  Synthetically generated peptide
  VARIANT (1)..(15): Xaa = Any Amino Acid
CCELXACNXPACTGA

SEQ ID NO: 7832 - protein, 16 aa, Artificial Sequence
  Synthetically generated peptide
  VARIANT (1)..(16): Xaa = Any Amino Acid
CCELXACNXXPACTGA

SEQ ID NO: 7833 - protein, 17 aa, Artificial Sequence
  Synthetically generated peptide
  VARIANT (1)..(17): Xaa = Any Amino Acid
CCELXACNXXXPACTGA

SEQ ID NO: 7834 - protein, 17 aa, Artificial Sequence
  Synthetically generated peptide
  VARIANT (1)..(17): Xaa = Any Amino Acid
CCELXACNXXPXACTGA

SEQ ID NO: 7835 - protein, 17 aa, Artificial Sequence
  Synthetically generated peptide
  VARIANT (1)..(17): Xaa = Any Amino Acid
CCELXACNXXPAXCTGA

SEQ ID NO: 7836 - protein, 17 aa, Artificial Sequence
  Synthetically generated peptide
  VARIANT (1)..(17): Xaa = Any Amino Acid
CCELXACNXXPACXTGA

SEQ ID NO: 7837 - protein, 17 aa, Artificial Sequence
  Synthetically generated peptide
  VARIANT (1)..(17): Xaa = Any Amino Acid
CCELXACNXXPACTXGA

SEQ ID NO: 7838 - protein, 17 aa, Artificial Sequence
  Synthetically generated peptide
  VARIANT (1)..(17): Xaa = Any Amino Acid
CCELXACNXXPACTGXA

SEQ ID NO: 7839 - protein, 16 aa, Artificial Sequence
  Synthetically generated peptide
  VARIANT (1)..(16): Xaa = Any Amino Acid
CCELXACNXPXACTGA

SEQ ID NO: 7840 - protein, 17 aa, Artificial Sequence
  Synthetically generated peptide
  VARIANT (1)..(17): Xaa = Any Amino Acid
CCELXACNXPXXACTGA

SEQ ID NO: 7841 - protein, 17 aa, Artificial Sequence
  Synthetically generated peptide
  VARIANT (1)..(17): Xaa = Any Amino Acid
CCELXACNXPXAXCTGA

SEQ ID NO: 7842 - protein, 17 aa, Artificial Sequence
  Synthetically generated peptide
  VARIANT (1)..(17): Xaa = Any Amino Acid
CCELXACNXPXACXTGA

SEQ ID NO: 7843 - protein, 17 aa, Artificial Sequence
  Synthetically generated peptide
  VARIANT (1)..(17): Xaa = Any Amino Acid
CCELXACNXPXACTXGA

SEQ ID NO: 7844 - protein, 17 aa, Artificial Sequence
  Synthetically generated peptide
  VARIANT (1)..(17): Xaa = Any Amino Acid
CCELXACNXPXACTGXA

SEQ ID NO: 7845 - protein, 16 aa, Artificial Sequence
  Synthetically generated peptide
  VARIANT (1)..(16): Xaa = Any Amino Acid
CCELXACNXPAXCTGA

SEQ ID NO: 7846 - protein, 17 aa, Artificial Sequence
  Synthetically generated peptide
  VARIANT (1)..(17): Xaa = Any Amino Acid
CCELXACNXPAXXCTGA

SEQ ID NO: 7847 - protein, 17 aa, Artificial Sequence
  Synthetically generated peptide
  VARIANT (1)..(17): Xaa = Any Amino Acid
CCELXACNXPAXCXTGA

SEQ ID NO: 7848 - protein, 17 aa, Artificial Sequence
  Synthetically generated peptide
  VARIANT (1)..(17): Xaa = Any Amino Acid
CCELXACNXPAXCTXGA

SEQ ID NO: 7849 - protein, 17 aa, Artificial Sequence
  Synthetically generated peptide
  VARIANT (1)..(17): Xaa = Any Amino Acid
CCELXACNXPAXCTGXA

SEQ ID NO: 7850 - protein, 16 aa, Artificial Sequence
  Synthetically generated peptide
  VARIANT (1)..(16): Xaa = Any Amino Acid
CCELXACNXPACXTGA

SEQ ID NO: 7851 - protein, 17 aa, Artificial Sequence
  Synthetically generated peptide
  VARIANT (1)..(17): Xaa = Any Amino Acid
CCELXACNXPACXXTGA

SEQ ID NO: 7852 - protein, 17 aa, Artificial Sequence
  Synthetically generated peptide
  VARIANT (1)..(17): Xaa = Any Amino Acid
CCELXACNXPACXTXGA

SEQ ID NO: 7853 - protein, 17 aa, Artificial Sequence
  Synthetically generated peptide
  VARIANT (1)..(17): Xaa = Any Amino Acid
CCELXACNXPACXTGXA

SEQ ID NO: 7854 - protein, 16 aa, Artificial Sequence
  Synthetically generated peptide
  VARIANT (1)..(16): Xaa = Any Amino Acid
CCELXACNXPACTXGA

SEQ ID NO: 7855 - protein, 17 aa, Artificial Sequence
  Synthetically generated peptide
  VARIANT (1)..(17): Xaa = Any Amino Acid
CCELXACNXPACTXXGA

SEQ ID NO: 7856 - protein, 17 aa, Artificial Sequence
  Synthetically generated peptide
  VARIANT (1)..(17): Xaa = Any Amino Acid
CCELXACNXPACTXGXA

SEQ ID NO: 7857 - protein, 16 aa, Artificial Sequence
  Synthetically generated peptide
  VARIANT (1)..(16): Xaa = Any Amino Acid
CCELXACNXPACTGXA

SEQ ID NO: 7858 - protein, 17 aa, Artificial Sequence
  Synthetically generated peptide
  VARIANT (1)..(17): Xaa = Any Amino Acid
CCELXACNXPACTGXXA

SEQ ID NO: 7859 - protein, 15 aa, Artificial Sequence
  Synthetically generated peptide
  VARIANT (1)..(15): Xaa = Any Amino Acid
CCELXACNPXACTGA

SEQ ID NO: 7860 - protein, 16 aa, Artificial Sequence
  Synthetically generated peptide
  VARIANT (1)..(16): Xaa = Any Amino Acid
CCELXACNPXXACTGA

SEQ ID NO: 7861 - protein, 17 aa, Artificial Sequence
  Synthetically generated peptide
  VARIANT (1)..(17): Xaa = Any Amino Acid
CCELXACNPXXXACTGA

SEQ ID NO: 7862 - protein, 17 aa, Artificial Sequence
  Synthetically generated peptide
  VARIANT (1)..(17): Xaa = Any Amino Acid
CCELXACNPXXAXCTGA

SEQ ID NO: 7863 - protein, 17 aa, Artificial Sequence
  Synthetically generated peptide
  VARIANT (1)..(17): Xaa = Any Amino Acid
CCELXACNPXXACXTGA

SEQ ID NO: 7864 - protein, 17 aa, Artificial Sequence
  Synthetically generated peptide
  VARIANT (1)..(17): Xaa = Any Amino Acid
CCELXACNPXXACTXGA

SEQ ID NO: 7865 - protein, 17 aa, Artificial Sequence
  Synthetically generated peptide
  VARIANT (1)..(17): Xaa = Any Amino Acid
CCELXACNPXXACTGXA

SEQ ID NO: 7866 - protein, 16 aa, Artificial Sequence
  Synthetically generated peptide
  VARIANT (1)..(16): Xaa = Any Amino Acid
CCELXACNPXAXCTGA

SEQ ID NO: 7867 - protein, 17 aa, Artificial Sequence
  Synthetically generated peptide
  VARIANT (1)..(17): Xaa = Any Amino Acid
CCELXACNPXAXXCTGA

SEQ ID NO: 7868 - protein, 17 aa, Artificial Sequence
  Synthetically generated peptide
  VARIANT (1)..(17): Xaa = Any Amino Acid
CCELXACNPXAXCXTGA

SEQ ID NO: 7869 - protein, 17 aa, Artificial Sequence
  Synthetically generated peptide
  VARIANT (1)..(17): Xaa = Any Amino Acid
CCELXACNPXAXCTXGA

SEQ ID NO: 7870 - protein, 17 aa, Artificial Sequence
  Synthetically generated peptide
  VARIANT (1)..(17): Xaa = Any Amino Acid
CCELXACNPXAXCTGXA

SEQ ID NO: 7871 - protein, 16 aa, Artificial Sequence
  Synthetically generated peptide
  VARIANT (1)..(16): Xaa = Any Amino Acid
CCELXACNPXACXTGA

SEQ ID NO: 7872 - protein, 17 aa, Artificial Sequence
  Synthetically generated peptide
  VARIANT (1)..(17): Xaa = Any Amino Acid
CCELXACNPXACXXTGA

SEQ ID NO: 7873 - protein, 17 aa, Artificial Sequence
  Synthetically generated peptide
  VARIANT (1)..(17): Xaa = Any Amino Acid
CCELXACNPXACXTXGA

SEQ ID NO: 7874 - protein, 17 aa, Artificial Sequence
  Synthetically generated peptide
  VARIANT (1)..(17): Xaa = Any Amino Acid
CCELXACNPXACXTGXA

SEQ ID NO: 7875 - protein, 16 aa, Artificial Sequence
  Synthetically generated peptide
  VARIANT (1)..(16): Xaa = Any Amino Acid
CCELXACNPXACTXGA

SEQ ID NO: 7876 - protein, 17 aa, Artificial Sequence
  Synthetically generated peptide
  VARIANT (1)..(17): Xaa = Any Amino Acid
CCELXACNPXACTXXGA

SEQ ID NO: 7877 - protein, 17 aa, Artificial Sequence
  Synthetically generated peptide
  VARIANT (1)..(17): Xaa = Any Amino Acid
CCELXACNPXACTXGXA

SEQ ID NO: 7878 - protein, 16 aa, Artificial Sequence
  Synthetically generated peptide
  VARIANT (1)..(16): Xaa = Any Amino Acid
CCELXACNPXACTGXA

SEQ ID NO: 7879 - protein, 17 aa, Artificial Sequence
  Synthetically generated peptide
  VARIANT (1)..(17): Xaa = Any Amino Acid
CCELXACNPXACTGXXA

SEQ ID NO: 7880 - protein, 15 aa, Artificial Sequence
  Synthetically generated peptide
  VARIANT (1)..(15): Xaa = Any Amino Acid
CCELXACNPAXCTGA

SEQ ID NO: 7881 - protein, 16 aa, Artificial Sequence
  Synthetically generated peptide
  VARIANT (1)..(16): Xaa = Any Amino Acid
CCELXACNPAXXCTGA

SEQ ID NO: 7882 - protein, 17 aa, Artificial Sequence
  Synthetically generated peptide
  VARIANT (1)..(17): Xaa = Any Amino Acid
CCELXACNPAXXXCTGA

SEQ ID NO: 7883 - protein, 17 aa, Artificial Sequence
  Synthetically generated peptide
  VARIANT (1)..(17): Xaa = Any Amino Acid
CCELXACNPAXXCXTGA

SEQ ID NO: 7884 - protein, 17 aa, Artificial Sequence
  Synthetically generated peptide
  VARIANT (1)..(17): Xaa = Any Amino Acid
CCELXACNPAXXCTXGA

SEQ ID NO: 7885 - protein, 17 aa, Artificial Sequence
  Synthetically generated peptide
  VARIANT (1)..(17): Xaa = Any Amino Acid
CCELXACNPAXXCTGXA

SEQ ID NO: 7886 - protein, 16 aa, Artificial Sequence
  Synthetically generated peptide
  VARIANT (1)..(16): Xaa = Any Amino Acid
CCELXACNPAXCXTGA

SEQ ID NO: 7887 - protein, 17 aa, Artificial Sequence
  Synthetically generated peptide
  VARIANT (1)..(17): Xaa = Any Amino Acid
CCELXACNPAXCXXTGA

SEQ ID NO: 7888 - protein, 17 aa, Artificial Sequence
  Synthetically generated peptide
  VARIANT (1)..(17): Xaa = Any Amino Acid
CCELXACNPAXCXTXGA

SEQ ID NO: 7889 - protein, 17 aa, Artificial Sequence
  Synthetically generated peptide
  VARIANT (1)..(17): Xaa = Any Amino Acid
CCELXACNPAXCXTGXA

SEQ ID NO: 7890 - protein, 16 aa, Artificial Sequence
  Synthetically generated peptide
  VARIANT (1)..(16): Xaa = Any Amino Acid
CCELXACNPAXCTXGA

SEQ ID NO: 7891 - protein, 17 aa, Artificial Sequence
  Synthetically generated peptide
  VARIANT (1)..(17): Xaa = Any Amino Acid
CCELXACNPAXCTXXGA

SEQ ID NO: 7892 - protein, 17 aa, Artificial Sequence
  Synthetically generated peptide
  VARIANT (1)..(17): Xaa = Any Amino Acid
CCELXACNPAXCTXGXA

SEQ ID NO: 7893 - protein, 16 aa, Artificial Sequence
  Synthetically generated peptide
  VARIANT (1)..(16): Xaa = Any Amino Acid
CCELXACNPAXCTGXA

SEQ ID NO: 7894 - protein, 17 aa, Artificial Sequence
  Synthetically generated peptide
  VARIANT (1)..(17): Xaa = Any Amino Acid
CCELXACNPAXCTGXXA

SEQ ID NO: 7895 - protein, 15 aa, Artificial Sequence
  Synthetically generated peptide
  VARIANT (1)..(15): Xaa = Any Amino Acid
CCELXACNPACXTGA

SEQ ID NO: 7896 - protein, 16 aa, Artificial Sequence
  Synthetically generated peptide
  VARIANT (1)..(16): Xaa = Any Amino Acid
CCELXACNPACXXTGA

SEQ ID NO: 7897 - protein, 17 aa, Artificial Sequence
  Synthetically generated peptide
  VARIANT (1)..(17): Xaa = Any Amino Acid
CCELXACNPACXXXTGA

SEQ ID NO: 7898 - protein, 17 aa, Artificial Sequence
  Synthetically generated peptide
  VARIANT (1)..(17): Xaa = Any Amino Acid
CCELXACNPACXXTXGA

SEQ ID NO: 7899 - protein, 17 aa, Artificial Sequence
  Synthetically generated peptide
  VARIANT (1)..(17): Xaa = Any Amino Acid
CCELXACNPACXXTGXA

SEQ ID NO: 7900 - protein, 16 aa, Artificial Sequence
  Synthetically generated peptide
  VARIANT (1)..(16): Xaa = Any Amino Acid
CCELXACNPACXTXGA

SEQ ID NO: 7901 - protein, 17 aa, Artificial Sequence
  Synthetically generated peptide
  VARIANT (1)..(17): Xaa = Any Amino Acid
CCELXACNPACXTXXGA

SEQ ID NO: 7902 - protein, 17 aa, Artificial Sequence
  Synthetically generated peptide
  VARIANT (1)..(17): Xaa = Any Amino Acid
CCELXACNPACXTXGXA

SEQ ID NO: 7903 - protein, 16 aa, Artificial Sequence
  Synthetically generated peptide
  VARIANT (1)..(16): Xaa = Any Amino Acid
CCELXACNPACXTGXA

SEQ ID NO: 7904 - protein, 17 aa, Artificial Sequence
  Synthetically generated peptide
  VARIANT (1)..(17): Xaa = Any Amino Acid
CCELXACNPACXTGXXA

SEQ ID NO: 7905 - protein, 15 aa, Artificial Sequence
  Synthetically generated peptide
  VARIANT (1)..(15): Xaa = Any Amino Acid
CCELXACNPACTXGA

SEQ ID NO: 7906 - protein, 16 aa, Artificial Sequence
  Synthetically generated peptide
  VARIANT (1)..(16): Xaa = Any Amino Acid
CCELXACNPACTXXGA

SEQ ID NO: 7907 - protein, 17 aa, Artificial Sequence
  Synthetically generated peptide
  VARIANT (1)..(17): Xaa = Any Amino Acid
CCELXACNPACTXXXGA

SEQ ID NO: 7908 - protein, 17 aa, Artificial Sequence
  Synthetically generated peptide
  VARIANT (1)..(17): Xaa = Any Amino Acid
CCELXACNPACTXXGXA

SEQ ID NO: 7909 - protein, 16 aa, Artificial Sequence
  Synthetically generated peptide
  VARIANT (1)..(16): Xaa = Any Amino Acid
CCELXACNPACTXGXA

SEQ ID NO: 7910 - protein, 17 aa, Artificial Sequence
  Synthetically generated peptide
  VARIANT (1)..(17): Xaa = Any Amino Acid
CCELXACNPACTXGXXA

SEQ ID NO: 7911 - protein, 15 aa, Artificial Sequence
  Synthetically generated peptide
  VARIANT (1)..(15): Xaa = Any Amino Acid
CCELXACNPACTGXA

SEQ ID NO: 7912 - protein, 16 aa, Artificial Sequence
  Synthetically generated peptide
  VARIANT (1)..(16): Xaa = Any Amino Acid
CCELXACNPACTGXXA

SEQ ID NO: 7913 - protein, 17 aa, Artificial Sequence
  Synthetically generated peptide
  VARIANT (1)..(17): Xaa = Any Amino Acid
CCELXACNPACTGXXXA

SEQ ID NO: 7914 - protein, 14 aa, Artificial Sequence
  Synthetically generated peptide
  VARIANT (1)..(14): Xaa = Any Amino Acid
CCELACXNPACTGA

SEQ ID NO: 7915 - protein, 15 aa, Artificial Sequence
  Synthetically generated peptide
  VARIANT (1)..(15): Xaa = Any Amino Acid
CCELACXXNPACTGA

SEQ ID NO: 7916 - protein, 16 aa, Artificial Sequence
  Synthetically generated peptide
  VARIANT (1)..(16): Xaa = Any Amino Acid
CCELACXXXNPACTGA

SEQ ID NO: 7917 - protein, 17 aa, Artificial Sequence
  Synthetically generated peptide
  VARIANT (1)..(17): Xaa = Any Amino Acid
CCELACXXXXNPACTGA

SEQ ID NO: 7918 - protein, 17 aa, Artificial Sequence
  Synthetically generated peptide
  VARIANT (1)..(17): Xaa = Any Amino Acid
CCELACXXXNXPACTGA

SEQ ID NO: 7919 - protein, 17 aa, Artificial Sequence
  Synthetically generated peptide
  VARIANT (1)..(17): Xaa = Any Amino Acid
CCELACXXXNPXACTGA

SEQ ID NO: 7920 - protein, 17 aa, Artificial Sequence
  Synthetically generated peptide
  VARIANT (1)..(17): Xaa = Any Amino Acid
CCELACXXXNPAXCTGA

SEQ ID NO: 7921 - protein, 17 aa, Artificial Sequence
  Synthetically generated peptide
  VARIANT (1)..(17): Xaa = Any Amino Acid
CCELACXXXNPACXTGA

SEQ ID NO: 7922 - protein, 17 aa, Artificial Sequence
  Synthetically generated peptide
  VARIANT (1)..(17): Xaa = Any Amino Acid
CCELACXXXNPACTXGA

SEQ ID NO: 7923 - protein, 17 aa, Artificial Sequence
  Synthetically generated peptide
  VARIANT (1)..(17): Xaa = Any Amino Acid
CCELACXXXNPACTGXA

SEQ ID NO: 7924 - protein, 16 aa, Artificial Sequence
  Synthetically generated peptide
  VARIANT (1)..(16): Xaa = Any Amino Acid
CCELACXXNXPACTGA

SEQ ID NO: 7925 - protein, 17 aa, Artificial Sequence
  Synthetically generated peptide
  VARIANT (1)..(17): Xaa = Any Amino Acid
CCELACXXNXXPACTGA

SEQ ID NO: 7926 - protein, 17 aa, Artificial Sequence
  Synthetically generated peptide
  VARIANT (1)..(17): Xaa = Any Amino Acid
CCELACXXNXPXACTGA

SEQ ID NO: 7927 - protein, 17 aa, Artificial Sequence
  Synthetically generated peptide
  VARIANT (1)..(17): Xaa = Any Amino Acid
CCELACXXNXPAXCTGA

SEQ ID NO: 7928 - protein, 17 aa, Artificial Sequence
  Synthetically generated peptide
  VARIANT (1)..(17): Xaa = Any Amino Acid
CCELACXXNXPACXTGA

SEQ ID NO: 7929 - protein, 17 aa, Artificial Sequence
  Synthetically generated peptide
  VARIANT (1)..(17): Xaa = Any Amino Acid
CCELACXXNXPACTXGA

SEQ ID NO: 7930 - protein, 17 aa, Artificial Sequence
  Synthetically generated peptide
  VARIANT (1)..(17): Xaa = Any Amino Acid
CCELACXXNXPACTGXA

SEQ ID NO: 7931 - protein, 16 aa, Artificial Sequence
  Synthetically generated peptide
  VARIANT (1)..(16): Xaa = Any Amino Acid
CCELACXXNPXACTGA

SEQ ID NO: 7932 - protein, 17 aa, Artificial Sequence
  Synthetically generated peptide
  VARIANT (1)..(17): Xaa = Any Amino Acid
CCELACXXNPXXACTGA

SEQ ID NO: 7933 - protein, 17 aa, Artificial Sequence
  Synthetically generated peptide
  VARIANT (1)..(17): Xaa = Any Amino Acid
CCELACXXNPXAXCTGA

SEQ ID NO: 7934 - protein, 17 aa, Artificial Sequence
  Synthetically generated peptide
  VARIANT (1)..(17): Xaa = Any Amino Acid
CCELACXXNPXACXTGA

SEQ ID NO: 7935 - protein, 17 aa, Artificial Sequence
  Synthetically generated peptide
  VARIANT (1)..(17): Xaa = Any Amino Acid
CCELACXXNPXACTXGA

SEQ ID NO: 7936 - protein, 17 aa, Artificial Sequence
  Synthetically generated peptide
  VARIANT (1)..(17): Xaa = Any Amino Acid
CCELACXXNPXACTGXA

SEQ ID NO: 7937 - protein, 16 aa, Artificial Sequence
  Synthetically generated peptide
  VARIANT (1)..(16): Xaa = Any Amino Acid
CCELACXXNPAXCTGA

SEQ ID NO: 7938 - protein, 17 aa, Artificial Sequence
  Synthetically generated peptide
  VARIANT (1)..(17): Xaa = Any Amino Acid
CCELACXXNPAXXCTGA

SEQ ID NO: 7939 - protein, 17 aa, Artificial Sequence
  Synthetically generated peptide
  VARIANT (1)..(17): Xaa = Any Amino Acid
CCELACXXNPAXCXTGA

SEQ ID NO: 7940 - protein, 17 aa, Artificial Sequence
  Synthetically generated peptide
  VARIANT (1)..(17): Xaa = Any Amino Acid
CCELACXXNPAXCTXGA

SEQ ID NO: 7941 - protein, 17 aa, Artificial Sequence
  Synthetically generated peptide
  VARIANT (1)..(17): Xaa = Any Amino Acid
CCELACXXNPAXCTGXA

SEQ ID NO: 7942 - protein, 16 aa, Artificial Sequence
  Synthetically generated peptide
  VARIANT (1)..(16): Xaa = Any Amino Acid
CCELACXXNPACXTGA

SEQ ID NO: 7943 - protein, 17 aa, Artificial Sequence
  Synthetically generated peptide
  VARIANT (1)..(17): Xaa = Any Amino Acid
CCELACXXNPACXXTGA

SEQ ID NO: 7944 - protein, 17 aa, Artificial Sequence
  Synthetically generated peptide
  VARIANT (1)..(17): Xaa = Any Amino Acid
CCELACXXNPACXTXGA

SEQ ID NO: 7945 - protein, 17 aa, Artificial Sequence
  Synthetically generated peptide
  VARIANT (1)..(17): Xaa = Any Amino Acid
CCELACXXNPACXTGXA

SEQ ID NO: 7946 - protein, 16 aa, Artificial Sequence
  Synthetically generated peptide
  VARIANT (1)..(16): Xaa = Any Amino Acid
CCELACXXNPACTXGA

SEQ ID NO: 7947 - protein, 17 aa, Artificial Sequence
  Synthetically generated peptide
  VARIANT (1)..(17): Xaa = Any Amino Acid
CCELACXXNPACTXXGA

SEQ ID NO: 7948 - protein, 17 aa, Artificial Sequence
  Synthetically generated peptide
  VARIANT (1)..(17): Xaa = Any Amino Acid
CCELACXXNPACTXGXA

SEQ ID NO: 7949 - protein, 16 aa, Artificial Sequence
  Synthetically generated peptide
  VARIANT (1)..(16): Xaa = Any Amino Acid
CCELACXXNPACTGXA

SEQ ID NO: 7950 - protein, 17 aa, Artificial Sequence
  Synthetically generated peptide
  VARIANT (1)..(17): Xaa = Any Amino Acid
CCELACXXNPACTGXXA

SEQ ID NO: 7951 - protein, 15 aa, Artificial Sequence
  Synthetically generated peptide
  VARIANT (1)..(15): Xaa = Any Amino Acid
CCELACXNXPACTGA

SEQ ID NO: 7952 - protein, 16 aa, Artificial Sequence
  Synthetically generated peptide
  VARIANT (1)..(16): Xaa = Any Amino Acid
CCELACXNXXPACTGA

SEQ ID NO: 7953 - protein, 17 aa, Artificial Sequence
  Synthetically generated peptide
  VARIANT (1)..(17): Xaa = Any Amino Acid
CCELACXNXXXPACTGA

SEQ ID NO: 7954 - protein, 17 aa, Artificial Sequence
  Synthetically generated peptide
  VARIANT (1)..(17): Xaa = Any Amino Acid
CCELACXNXXPXACTGA

SEQ ID NO: 7955 - protein, 17 aa, Artificial Sequence
  Synthetically generated peptide
  VARIANT (1)..(17): Xaa = Any Amino Acid
CCELACXNXXPAXCTGA

SEQ ID NO: 7956 - protein, 17 aa, Artificial Sequence
  Synthetically generated peptide
  VARIANT (1)..(17): Xaa = Any Amino Acid
CCELACXNXXPACXTGA

SEQ ID NO: 7957 - protein, 17 aa, Artificial Sequence
  Synthetically generated peptide
  VARIANT (1)..(17): Xaa = Any Amino Acid
CCELACXNXXPACTXGA

SEQ ID NO: 7958 - protein, 17 aa, Artificial Sequence
  Synthetically generated peptide
  VARIANT (1)..(17): Xaa = Any Amino Acid
CCELACXNXXPACTGXA

SEQ ID NO: 7959 - protein, 16 aa, Artificial Sequence
  Synthetically generated peptide
  VARIANT (1)..(16): Xaa = Any Amino Acid
CCELACXNXPXACTGA

SEQ ID NO: 7960 - protein, 17 aa, Artificial Sequence
  Synthetically generated peptide
  VARIANT (1)..(17): Xaa = Any Amino Acid
CCELACXNXPXXACTGA

SEQ ID NO: 7961 - protein, 17 aa, Artificial Sequence
  Synthetically generated peptide
  VARIANT (1)..(17): Xaa = Any Amino Acid
CCELACXNXPXAXCTGA

SEQ ID NO: 7962 - protein, 17 aa, Artificial Sequence
  Synthetically generated peptide
  VARIANT (1)..(17): Xaa = Any Amino Acid
CCELACXNXPXACXTGA

SEQ ID NO: 7963 - protein, 17 aa, Artificial Sequence
  Synthetically generated peptide
  VARIANT (1)..(17): Xaa = Any Amino Acid
CCELACXNXPXACTXGA

SEQ ID NO: 7964 - protein, 17 aa, Artificial Sequence
  Synthetically generated peptide
  VARIANT (1)..(17): Xaa = Any Amino Acid
CCELACXNXPXACTGXA

SEQ ID NO: 7965 - protein, 16 aa, Artificial Sequence
  Synthetically generated peptide
  VARIANT (1)..(16): Xaa = Any Amino Acid
CCELACXNXPAXCTGA

SEQ ID NO: 7966 - protein, 17 aa, Artificial Sequence
  Synthetically generated peptide
  VARIANT (1)..(17): Xaa = Any Amino Acid
CCELACXNXPAXXCTGA

SEQ ID NO: 7967 - protein, 17 aa, Artificial Sequence
  Synthetically generated peptide
  VARIANT (1)..(17): Xaa = Any Amino Acid
CCELACXNXPAXCXTGA

SEQ ID NO: 7968 - protein, 17 aa, Artificial Sequence
  Synthetically generated peptide
  VARIANT (1)..(17): Xaa = Any Amino Acid
CCELACXNXPAXCTXGA

SEQ ID NO: 7969 - protein, 17 aa, Artificial Sequence
  Synthetically generated peptide
  VARIANT (1)..(17): Xaa = Any Amino Acid
CCELACXNXPAXCTGXA

SEQ ID NO: 7970 - protein, 16 aa, Artificial Sequence
  Synthetically generated peptide
  VARIANT (1)..(16): Xaa = Any Amino Acid
CCELACXNXPACXTGA

SEQ ID NO: 7971 - protein, 17 aa, Artificial Sequence
  Synthetically generated peptide
  VARIANT (1)..(17): Xaa = Any Amino Acid
CCELACXNXPACXXTGA

SEQ ID NO: 7972 - protein, 17 aa, Artificial Sequence
  Synthetically generated peptide
  VARIANT (1)..(17): Xaa = Any Amino Acid
CCELACXNXPACXTXGA

SEQ ID NO: 7973 - protein, 17 aa, Artificial Sequence
  Synthetically generated peptide
  VARIANT (1)..(17): Xaa = Any Amino Acid
CCELACXNXPACXTGXA

SEQ ID NO: 7974 - protein, 16 aa, Artificial Sequence
  Synthetically generated peptide
  VARIANT (1)..(16): Xaa = Any Amino Acid
CCELACXNXPACTXGA

SEQ ID NO: 7975 - protein, 17 aa, Artificial Sequence
  Synthetically generated peptide
  VARIANT (1)..(17): Xaa = Any Amino Acid
CCELACXNXPACTXXGA

SEQ ID NO: 7976 - protein, 17 aa, Artificial Sequence
  Synthetically generated peptide
  VARIANT (1)..(17): Xaa = Any Amino Acid
CCELACXNXPACTXGXA

SEQ ID NO: 7977 - protein, 16 aa, Artificial Sequence
  Synthetically generated peptide
  VARIANT (1)..(16): Xaa = Any Amino Acid
CCELACXNXPACTGXA

SEQ ID NO: 7978 - protein, 17 aa, Artificial Sequence
  Synthetically generated peptide
  VARIANT (1)..(17): Xaa = Any Amino Acid
CCELACXNXPACTGXXA

SEQ ID NO: 7979 - protein, 15 aa, Artificial Sequence
  Synthetically generated peptide
  VARIANT (1)..(15): Xaa = Any Amino Acid
CCELACXNPXACTGA

SEQ ID NO: 7980 - protein, 16 aa, Artificial Sequence
  Synthetically generated peptide
  VARIANT (1)..(16): Xaa = Any Amino Acid
CCELACXNPXXACTGA

SEQ ID NO: 7981 - protein, 17 aa, Artificial Sequence
  Synthetically generated peptide
  VARIANT (1)..(17): Xaa = Any Amino Acid
CCELACXNPXXXACTGA

SEQ ID NO: 7982 - protein, 17 aa, Artificial Sequence
  Synthetically generated peptide
  VARIANT (1)..(17): Xaa = Any Amino Acid
CCELACXNPXXAXCTGA

SEQ ID NO: 7983 - protein, 17 aa, Artificial Sequence
  Synthetically generated peptide
  VARIANT (1)..(17): Xaa = Any Amino Acid
CCELACXNPXXACXTGA

SEQ ID NO: 7984 - protein, 17 aa, Artificial Sequence
  Synthetically generated peptide
  VARIANT (1)..(17): Xaa = Any Amino Acid
CCELACXNPXXACTXGA

SEQ ID NO: 7985 - protein, 17 aa, Artificial Sequence
  Synthetically generated peptide
  VARIANT (1)..(17): Xaa = Any Amino Acid
CCELACXNPXXACTGXA

SEQ ID NO: 7986 - protein, 16 aa, Artificial Sequence
  Synthetically generated peptide
  VARIANT (1)..(16): Xaa = Any Amino Acid
CCELACXNPXAXCTGA

SEQ ID NO: 7987 - protein, 17 aa, Artificial Sequence
  Synthetically generated peptide
  VARIANT (1)..(17): Xaa = Any Amino Acid
CCELACXNPXAXXCTGA

SEQ ID NO: 7988 - protein, 17 aa, Artificial Sequence
  Synthetically generated peptide
  VARIANT (1)..(17): Xaa = Any Amino Acid
CCELACXNPXAXCXTGA

SEQ ID NO: 7989 - protein, 17 aa, Artificial Sequence
  Synthetically generated peptide
  VARIANT (1)..(17): Xaa = Any Amino Acid
CCELACXNPXAXCTXGA

SEQ ID NO: 7990 - protein, 17 aa, Artificial Sequence
  Synthetically generated peptide
  VARIANT (1)..(17): Xaa = Any Amino Acid
CCELACXNPXAXCTGXA

SEQ ID NO: 7991 - protein, 16 aa, Artificial Sequence
  Synthetically generated peptide
  VARIANT (1)..(16): Xaa = Any Amino Acid
CCELACXNPXACXTGA

SEQ ID NO: 7992 - protein, 17 aa, Artificial Sequence
  Synthetically generated peptide
  VARIANT (1)..(17): Xaa = Any Amino Acid
CCELACXNPXACXXTGA

SEQ ID NO: 7993 - protein, 17 aa, Artificial Sequence
  Synthetically generated peptide
  VARIANT (1)..(17): Xaa = Any Amino Acid
CCELACXNPXACXTXGA

SEQ ID NO: 7994 - protein, 17 aa, Artificial Sequence
  Synthetically generated peptide
  VARIANT (1)..(17): Xaa = Any Amino Acid
CCELACXNPXACXTGXA

SEQ ID NO: 7995 - protein, 16 aa, Artificial Sequence
  Synthetically generated peptide
  VARIANT (1)..(16): Xaa = Any Amino Acid
CCELACXNPXACTXGA

SEQ ID NO: 7996 - protein, 17 aa, Artificial Sequence
  Synthetically generated peptide
  VARIANT (1)..(17): Xaa = Any Amino Acid
CCELACXNPXACTXXGA

SEQ ID NO: 7997 - protein, 17 aa, Artificial Sequence
  Synthetically generated peptide
  VARIANT (1)..(17): Xaa = Any Amino Acid
CCELACXNPXACTXGXA

SEQ ID NO: 7998 - protein, 16 aa, Artificial Sequence
  Synthetically generated peptide
  VARIANT (1)..(16): Xaa = Any Amino Acid
CCELACXNPXACTGXA

SEQ ID NO: 7999 - protein, 17 aa, Artificial Sequence
  Synthetically generated peptide
  VARIANT (1)..(17): Xaa = Any Amino Acid
CCELACXNPXACTGXXA

SEQ ID NO: 8000 - protein, 15 aa, Artificial Sequence
  Synthetically generated peptide
  VARIANT (1)..(15): Xaa = Any Amino Acid
CCELACXNPAXCTGA

SEQ ID NO: 8001 - protein, 16 aa, Artificial Sequence
  Synthetically generated peptide
  VARIANT (1)..(16): Xaa = Any Amino Acid
CCELACXNPAXXCTGA

SEQ ID NO: 8002 - protein, 17 aa, Artificial Sequence
  Synthetically generated peptide
  VARIANT (1)..(17): Xaa = Any Amino Acid
CCELACXNPAXXXCTGA

SEQ ID NO: 8003 - protein, 17 aa, Artificial Sequence
  Synthetically generated peptide
  VARIANT (1)..(17): Xaa = Any Amino Acid
CCELACXNPAXXCXTGA

SEQ ID NO: 8004 - protein, 17 aa, Artificial Sequence
  Synthetically generated peptide
  VARIANT (1)..(17): Xaa = Any Amino Acid
CCELACXNPAXXCTXGA

SEQ ID NO: 8005 - protein, 17 aa, Artificial Sequence
  Synthetically generated peptide
  VARIANT (1)..(17): Xaa = Any Amino Acid
CCELACXNPAXXCTGXA

SEQ ID NO: 8006 - protein, 16 aa, Artificial Sequence
  Synthetically generated peptide
  VARIANT (1)..(16): Xaa = Any Amino Acid
CCELACXNPAXCXTGA

SEQ ID NO: 8007 - protein, 17 aa, Artificial Sequence
  Synthetically generated peptide
  VARIANT (1)..(17): Xaa = Any Amino Acid
CCELACXNPAXCXXTGA

SEQ ID NO: 8008 - protein, 17 aa, Artificial Sequence
  Synthetically generated peptide
  VARIANT (1)..(17): Xaa = Any Amino Acid
CCELACXNPAXCXTXGA

SEQ ID NO: 8009 - protein, 17 aa, Artificial Sequence
  Synthetically generated peptide
  VARIANT (1)..(17): Xaa = Any Amino Acid
CCELACXNPAXCXTGXA

SEQ ID NO: 8010 - protein, 16 aa, Artificial Sequence
  Synthetically generated peptide
  VARIANT (1)..(16): Xaa = Any Amino Acid
CCELACXNPAXCTXGA

SEQ ID NO: 8011 - protein, 17 aa, Artificial Sequence
  Synthetically generated peptide
  VARIANT (1)..(17): Xaa = Any Amino Acid
CCELACXNPAXCTXXGA

SEQ ID NO: 8012 - protein, 17 aa, Artificial Sequence
  Synthetically generated peptide
  VARIANT (1)..(17): Xaa = Any Amino Acid
CCELACXNPAXCTXGXA

SEQ ID NO: 8013 - protein, 16 aa, Artificial Sequence
  Synthetically generated peptide
  VARIANT (1)..(16): Xaa = Any Amino Acid
CCELACXNPAXCTGXA

SEQ ID NO: 8014 - protein, 17 aa, Artificial Sequence
  Synthetically generated peptide
  VARIANT (1)..(17): Xaa = Any Amino Acid
CCELACXNPAXCTGXXA

SEQ ID NO: 8015 - protein, 15 aa, Artificial Sequence
  Synthetically generated peptide
  VARIANT (1)..(15): Xaa = Any Amino Acid
CCELACXNPACXTGA

SEQ ID NO: 8016 - protein, 16 aa, Artificial Sequence
  Synthetically generated peptide
  VARIANT (1)..(16): Xaa = Any Amino Acid
CCELACXNPACXXTGA

SEQ ID NO: 8017 - protein, 17 aa, Artificial Sequence
  Synthetically generated peptide
  VARIANT (1)..(17): Xaa = Any Amino Acid
CCELACXNPACXXXTGA

SEQ ID NO: 8018 - protein, 17 aa, Artificial Sequence
  Synthetically generated peptide
  VARIANT (1)..(17): Xaa = Any Amino Acid
CCELACXNPACXXTXGA

SEQ ID NO: 8019 - protein, 17 aa, Artificial Sequence
  Synthetically generated peptide
  VARIANT (1)..(17): Xaa = Any Amino Acid
CCELACXNPACXXTGXA

SEQ ID NO: 8020 - protein, 16 aa, Artificial Sequence
  Synthetically generated peptide
  VARIANT (1)..(16): Xaa = Any Amino Acid
CCELACXNPACXTXGA

SEQ ID NO: 8021 - protein, 17 aa, Artificial Sequence
  Synthetically generated peptide
  VARIANT (1)..(17): Xaa = Any Amino Acid
CCELACXNPACXTXXGA

SEQ ID NO: 8022 - protein, 17 aa, Artificial Sequence
  Synthetically generated peptide
  VARIANT (1)..(17): Xaa = Any Amino Acid
CCELACXNPACXTXGXA

SEQ ID NO: 8023 - protein, 16 aa, Artificial Sequence
  Synthetically generated peptide
  VARIANT (1)..(16): Xaa = Any Amino Acid
CCELACXNPACXTGXA

SEQ ID NO: 8024 - protein, 17 aa, Artificial Sequence
  Synthetically generated peptide
  VARIANT (1)..(17): Xaa = Any Amino Acid
CCELACXNPACXTGXXA

SEQ ID NO: 8025 - protein, 15 aa, Artificial Sequence
  Synthetically generated peptide
  VARIANT (1)..(15): Xaa = Any Amino Acid
CCELACXNPACTXGA

SEQ ID NO: 8026 - protein, 16 aa, Artificial Sequence
  Synthetically generated peptide
  VARIANT (1)..(16): Xaa = Any Amino Acid
CCELACXNPACTXXGA

SEQ ID NO: 8027 - protein, 17 aa, Artificial Sequence
  Synthetically generated peptide
  VARIANT (1)..(17): Xaa = Any Amino Acid
CCELACXNPACTXXXGA

SEQ ID NO: 8028 - protein, 17 aa, Artificial Sequence
  Synthetically generated peptide
  VARIANT (1)..(17): Xaa = Any Amino Acid
CCELACXNPACTXXGXA

SEQ ID NO: 8029 - protein, 16 aa, Artificial Sequence
  Synthetically generated peptide
  VARIANT (1)..(16): Xaa = Any Amino Acid
CCELACXNPACTXGXA

SEQ ID NO: 8030 - protein, 17 aa, Artificial Sequence
  Synthetically generated peptide
  VARIANT (1)..(17): Xaa = Any Amino Acid
CCELACXNPACTXGXXA

SEQ ID NO: 8031 - protein, 15 aa, Artificial Sequence
  Synthetically generated peptide
  VARIANT (1)..(15): Xaa = Any Amino Acid
CCELACXNPACTGXA

SEQ ID NO: 8032 - protein, 16 aa, Artificial Sequence
  Synthetically generated peptide
  VARIANT (1)..(16): Xaa = Any Amino Acid
CCELACXNPACTGXXA

SEQ ID NO: 8033 - protein, 17 aa, Artificial Sequence
  Synthetically generated peptide
  VARIANT (1)..(17): Xaa = Any Amino Acid
CCELACXNPACTGXXXA

SEQ ID NO: 8034 - protein, 14 aa, Artificial Sequence
  Synthetically generated peptide
  VARIANT (1)..(14): Xaa = Any Amino Acid
CCELACNXPACTGA

SEQ ID NO: 8035 - protein, 15 aa, Artificial Sequence
  Synthetically generated peptide
  VARIANT (1)..(15): Xaa = Any Amino Acid
CCELACNXXPACTGA

SEQ ID NO: 8036 - protein, 16 aa, Artificial Sequence
  Synthetically generated peptide
  VARIANT (1)..(16): Xaa = Any Amino Acid
CCELACNXXXPACTGA

SEQ ID NO: 8037 - protein, 17 aa, Artificial Sequence
  Synthetically generated peptide
  VARIANT (1)..(17): Xaa = Any Amino Acid
CCELACNXXXXPACTGA

SEQ ID NO: 8038 - protein, 17 aa, Artificial Sequence
  Synthetically generated peptide
  VARIANT (1)..(17): Xaa = Any Amino Acid
CCELACNXXXPXACTGA

SEQ ID NO: 8039 - protein, 17 aa, Artificial Sequence
  Synthetically generated peptide
  VARIANT (1)..(17): Xaa = Any Amino Acid
CCELACNXXXPAXCTGA

SEQ ID NO: 8040 - protein, 17 aa, Artificial Sequence
  Synthetically generated peptide
  VARIANT (1)..(17): Xaa = Any Amino Acid
CCELACNXXXPACXTGA

SEQ ID NO: 8041 - protein, 17 aa, Artificial Sequence
  Synthetically generated peptide
  VARIANT (1)..(17): Xaa = Any Amino Acid
CCELACNXXXPACTXGA

SEQ ID NO: 8042 - protein, 17 aa, Artificial Sequence
  Synthetically generated peptide
  VARIANT (1)..(17): Xaa = Any Amino Acid
CCELACNXXXPACTGXA

SEQ ID NO: 8043 - protein, 16 aa, Artificial Sequence
  Synthetically generated peptide
  VARIANT (1)..(16): Xaa = Any Amino Acid
CCELACNXXPXACTGA

SEQ ID NO: 8044 - protein, 17 aa, Artificial Sequence
  Synthetically generated peptide
  VARIANT (1)..(17): Xaa = Any Amino Acid
CCELACNXXPXXACTGA

SEQ ID NO: 8045 - protein, 17 aa, Artificial Sequence
  Synthetically generated peptide
  VARIANT (1)..(17): Xaa = Any Amino Acid
CCELACNXXPXAXCTGA

SEQ ID NO: 8046 - protein, 17 aa, Artificial Sequence
  Synthetically generated peptide
  VARIANT (1)..(17): Xaa = Any Amino Acid
CCELACNXXPXACXTGA

SEQ ID NO: 8047 - protein, 17 aa, Artificial Sequence
  Synthetically generated peptide
  VARIANT (1)..(17): Xaa = Any Amino Acid
CCELACNXXPXACTXGA

SEQ ID NO: 8048 - protein, 17 aa, Artificial Sequence
  Synthetically generated peptide
  VARIANT (1)..(17): Xaa = Any Amino Acid
CCELACNXXPXACTGXA

SEQ ID NO: 8049 - protein, 16 aa, Artificial Sequence
  Synthetically generated peptide
  VARIANT (1)..(16): Xaa = Any Amino Acid
CCELACNXXPAXCTGA

SEQ ID NO: 8050 - protein, 17 aa, Artificial Sequence
  Synthetically generated peptide
  VARIANT (1)..(17): Xaa = Any Amino Acid
CCELACNXXPAXXCTGA

SEQ ID NO: 8051 - protein, 17 aa, Artificial Sequence
  Synthetically generated peptide
  VARIANT (1)..(17): Xaa = Any Amino Acid
CCELACNXXPAXCXTGA

SEQ ID NO: 8052 - protein, 17 aa, Artificial Sequence
  Synthetically generated peptide
  VARIANT (1)..(17): Xaa = Any Amino Acid
CCELACNXXPAXCTXGA

SEQ ID NO: 8053 - protein, 17 aa, Artificial Sequence
  Synthetically generated peptide
  VARIANT (1)..(17): Xaa = Any Amino Acid
CCELACNXXPAXCTGXA

SEQ ID NO: 8054 - protein, 16 aa, Artificial Sequence
  Synthetically generated peptide
  VARIANT (1)..(16): Xaa = Any Amino Acid
CCELACNXXPACXTGA

SEQ ID NO: 8055 - protein, 17 aa, Artificial Sequence
  Synthetically generated peptide
  VARIANT (1)..(17): Xaa = Any Amino Acid
CCELACNXXPACXXTGA

SEQ ID NO: 8056 - protein, 17 aa, Artificial Sequence
  Synthetically generated peptide
  VARIANT (1)..(17): Xaa = Any Amino Acid
CCELACNXXPACXTXGA

SEQ ID NO: 8057 - protein, 17 aa, Artificial Sequence
  Synthetically generated peptide
  VARIANT (1)..(17): Xaa = Any Amino Acid
CCELACNXXPACXTGXA

SEQ ID NO: 8058 - protein, 16 aa, Artificial Sequence
  Synthetically generated peptide
  VARIANT (1)..(16): Xaa = Any Amino Acid
CCELACNXXPACTXGA

SEQ ID NO: 8059 - protein, 17 aa, Artificial Sequence
  Synthetically generated peptide
  VARIANT (1)..(17): Xaa = Any Amino Acid
CCELACNXXPACTXXGA

SEQ ID NO: 8060 - protein, 17 aa, Artificial Sequence
  Synthetically generated peptide
  VARIANT (1)..(17): Xaa = Any Amino Acid
CCELACNXXPACTXGXA

SEQ ID NO: 8061 - protein, 16 aa, Artificial Sequence
  Synthetically generated peptide
  VARIANT (1)..(16): Xaa = Any Amino Acid
CCELACNXXPACTGXA

SEQ ID NO: 8062 - protein, 17 aa, Artificial Sequence
  Synthetically generated peptide
  VARIANT (1)..(17): Xaa = Any Amino Acid
CCELACNXXPACTGXXA

SEQ ID NO: 8063 - protein, 15 aa, Artificial Sequence
  Synthetically generated peptide
  VARIANT (1)..(15): Xaa = Any Amino Acid
CCELACNXPXACTGA

SEQ ID NO: 8064 - protein, 16 aa, Artificial Sequence
  Synthetically generated peptide
  VARIANT (1)..(16): Xaa = Any Amino Acid
CCELACNXPXXACTGA

SEQ ID NO: 8065 - protein, 17 aa, Artificial Sequence
  Synthetically generated peptide
  VARIANT (1)..(17): Xaa = Any Amino Acid
CCELACNXPXXXACTGA

SEQ ID NO: 8066 - protein, 17 aa, Artificial Sequence
  Synthetically generated peptide
  VARIANT (1)..(17): Xaa = Any Amino Acid
CCELACNXPXXAXCTGA

SEQ ID NO: 8067 - protein, 17 aa, Artificial Sequence
  Synthetically generated peptide
  VARIANT (1)..(17): Xaa = Any Amino Acid
CCELACNXPXXACXTGA

SEQ ID NO: 8068 - protein, 17 aa, Artificial Sequence
  Synthetically generated peptide
  VARIANT (1)..(17): Xaa = Any Amino Acid
CCELACNXPXXACTXGA

SEQ ID NO: 8069 - protein, 17 aa, Artificial Sequence
  Synthetically generated peptide
  VARIANT (1)..(17): Xaa = Any Amino Acid
CCELACNXPXXACTGXA

SEQ ID NO: 8070 - protein, 16 aa, Artificial Sequence
  Synthetically generated peptide
  VARIANT (1)..(16): Xaa = Any Amino Acid
CCELACNXPXAXCTGA

SEQ ID NO: 8071 - protein, 17 aa, Artificial Sequence
  Synthetically generated peptide
  VARIANT (1)..(17): Xaa = Any Amino Acid
CCELACNXPXAXXCTGA

SEQ ID NO: 8072 - protein, 17 aa, Artificial Sequence
  Synthetically generated peptide
  VARIANT (1)..(17): Xaa = Any Amino Acid
CCELACNXPXAXCXTGA

SEQ ID NO: 8073 - protein, 17 aa, Artificial Sequence
  Synthetically generated peptide
  VARIANT (1)..(17): Xaa = Any Amino Acid
CCELACNXPXAXCTXGA

SEQ ID NO: 8074 - protein, 17 aa, Artificial Sequence
  Synthetically generated peptide
  VARIANT (1)..(17): Xaa = Any Amino Acid
CCELACNXPXAXCTGXA

SEQ ID NO: 8075 - protein, 16 aa, Artificial Sequence
  Synthetically generated peptide
  VARIANT (1)..(16): Xaa = Any Amino Acid
CCELACNXPXACXTGA

SEQ ID NO: 8076 - protein, 17 aa, Artificial Sequence
  Synthetically generated peptide
  VARIANT (1)..(17): Xaa = Any Amino Acid
CCELACNXPXACXXTGA

SEQ ID NO: 8077 - protein, 17 aa, Artificial Sequence
  Synthetically generated peptide
  VARIANT (1)..(17): Xaa = Any Amino Acid
CCELACNXPXACXTXGA

SEQ ID NO: 8078 - protein, 17 aa, Artificial Sequence
  Synthetically generated peptide
  VARIANT (1)..(17): Xaa = Any Amino Acid
CCELACNXPXACXTGXA

SEQ ID NO: 8079 - protein, 16 aa, Artificial Sequence
  Synthetically generated peptide
  VARIANT (1)..(16): Xaa = Any Amino Acid
CCELACNXPXACTXGA

SEQ ID NO: 8080 - protein, 17 aa, Artificial Sequence
  Synthetically generated peptide
  VARIANT (1)..(17): Xaa = Any Amino Acid
CCELACNXPXACTXXGA

SEQ ID NO: 8081 - protein, 17 aa, Artificial Sequence
  Synthetically generated peptide
  VARIANT (1)..(17): Xaa = Any Amino Acid
CCELACNXPXACTXGXA

SEQ ID NO: 8082 - protein, 16 aa, Artificial Sequence
  Synthetically generated peptide
  VARIANT (1)..(16): Xaa = Any Amino Acid
CCELACNXPXACTGXA

SEQ ID NO: 8083 - protein, 17 aa, Artificial Sequence
  Synthetically generated peptide
  VARIANT (1)..(17): Xaa = Any Amino Acid
CCELACNXPXACTGXXA

SEQ ID NO: 8084 - protein, 15 aa, Artificial Sequence
  Synthetically generated peptide
  VARIANT (1)..(15): Xaa = Any Amino Acid
CCELACNXPAXCTGA

SEQ ID NO: 8085 - protein, 16 aa, Artificial Sequence
  Synthetically generated peptide
  VARIANT (1)..(16): Xaa = Any Amino Acid
CCELACNXPAXXCTGA

SEQ ID NO: 8086 - protein, 17 aa, Artificial Sequence
  Synthetically generated peptide
  VARIANT (1)..(17): Xaa = Any Amino Acid
CCELACNXPAXXXCTGA

SEQ ID NO: 8087 - protein, 17 aa, Artificial Sequence
  Synthetically generated peptide
  VARIANT (1)..(17): Xaa = Any Amino Acid
CCELACNXPAXXCXTGA

SEQ ID NO: 8088 - protein, 17 aa, Artificial Sequence
  Synthetically generated peptide
  VARIANT (1)..(17): Xaa = Any Amino Acid
CCELACNXPAXXCTXGA

SEQ ID NO: 8089 - protein, 17 aa, Artificial Sequence
  Synthetically generated peptide
  VARIANT (1)..(17): Xaa = Any Amino Acid
CCELACNXPAXXCTGXA

SEQ ID NO: 8090 - protein, 16 aa, Artificial Sequence
  Synthetically generated peptide
  VARIANT (1)..(16): Xaa = Any Amino Acid
CCELACNXPAXCXTGA

SEQ ID NO: 8091 - protein, 17 aa, Artificial Sequence
  Synthetically generated peptide
  VARIANT (1)..(17): Xaa = Any Amino Acid
CCELACNXPAXCXXTGA

SEQ ID NO: 8092 - protein, 17 aa, Artificial Sequence
  Synthetically generated peptide
  VARIANT (1)..(17): Xaa = Any Amino Acid
CCELACNXPAXCXTXGA

SEQ ID NO: 8093 - protein, 17 aa, Artificial Sequence
  Synthetically generated peptide
  VARIANT (1)..(17): Xaa = Any Amino Acid
CCELACNXPAXCXTGXA

SEQ ID NO: 8094 - protein, 16 aa, Artificial Sequence
  Synthetically generated peptide
  VARIANT (1)..(16): Xaa = Any Amino Acid
CCELACNXPAXCTXGA

SEQ ID NO: 8095 - protein, 17 aa, Artificial Sequence
  Synthetically generated peptide
  VARIANT (1)..(17): Xaa = Any Amino Acid
CCELACNXPAXCTXXGA

SEQ ID NO: 8096 - protein, 17 aa, Artificial Sequence
  Synthetically generated peptide
  VARIANT (1)..(17): Xaa = Any Amino Acid
CCELACNXPAXCTXGXA

SEQ ID NO: 8097 - protein, 16 aa, Artificial Sequence
  Synthetically generated peptide
  VARIANT (1)..(16): Xaa = Any Amino Acid
CCELACNXPAXCTGXA

SEQ ID NO: 8098 - protein, 17 aa, Artificial Sequence
  Synthetically generated peptide
  VARIANT (1)..(17): Xaa = Any Amino Acid
CCELACNXPAXCTGXXA

SEQ ID NO: 8099 - protein, 15 aa, Artificial Sequence
  Synthetically generated peptide
  VARIANT (1)..(15): Xaa = Any Amino Acid
CCELACNXPACXTGA

SEQ ID NO: 8100 - protein, 16 aa, Artificial Sequence
  Synthetically generated peptide
  VARIANT (1)..(16): Xaa = Any Amino Acid
CCELACNXPACXXTGA

SEQ ID NO: 8101 - protein, 17 aa, Artificial Sequence
  Synthetically generated peptide
  VARIANT (1)..(17): Xaa = Any Amino Acid
CCELACNXPACXXXTGA

SEQ ID NO: 8102 - protein, 17 aa, Artificial Sequence
  Synthetically generated peptide
  VARIANT (1)..(17): Xaa = Any Amino Acid
CCELACNXPACXXTXGA

SEQ ID NO: 8103 - protein, 17 aa, Artificial Sequence
  Synthetically generated peptide
  VARIANT (1)..(17): Xaa = Any Amino Acid
CCELACNXPACXXTGXA

SEQ ID NO: 8104 - protein, 16 aa, Artificial Sequence
  Synthetically generated peptide
  VARIANT (1)..(16): Xaa = Any Amino Acid
CCELACNXPACXTXGA

SEQ ID NO: 8105 - protein, 17 aa, Artificial Sequence
  Synthetically generated peptide
  VARIANT (1)..(17): Xaa = Any Amino Acid
CCELACNXPACXTXXGA

SEQ ID NO: 8106 - protein, 17 aa, Artificial Sequence
  Synthetically generated peptide
  VARIANT (1)..(17): Xaa = Any Amino Acid
CCELACNXPACXTXGXA

SEQ ID NO: 8107 - protein, 16 aa, Artificial Sequence
  Synthetically generated peptide
  VARIANT (1)..(16): Xaa = Any Amino Acid
CCELACNXPACXTGXA

SEQ ID NO: 8108 - protein, 17 aa, Artificial Sequence
  Synthetically generated peptide
  VARIANT (1)..(17): Xaa = Any Amino Acid
CCELACNXPACXTGXXA

SEQ ID NO: 8109 - protein, 15 aa, Artificial Sequence
  Synthetically generated peptide
  VARIANT (1)..(15): Xaa = Any Amino Acid
CCELACNXPACTXGA

SEQ ID NO: 8110 - protein, 16 aa, Artificial Sequence
  Synthetically generated peptide
  VARIANT (1)..(16): Xaa = Any Amino Acid
CCELACNXPACTXXGA

SEQ ID NO: 8111 - protein, 17 aa, Artificial Sequence
  Synthetically generated peptide
  VARIANT (1)..(17): Xaa = Any Amino Acid
CCELACNXPACTXXXGA

SEQ ID NO: 8112 - protein, 17 aa, Artificial Sequence
  Synthetically generated peptide
  VARIANT (1)..(17): Xaa = Any Amino Acid
CCELACNXPACTXXGXA

SEQ ID NO: 8113 - protein, 16 aa, Artificial Sequence
  Synthetically generated peptide
  VARIANT (1)..(16): Xaa = Any Amino Acid
CCELACNXPACTXGXA

SEQ ID NO: 8114 - protein, 17 aa, Artificial Sequence
  Synthetically generated peptide
  VARIANT (1)..(17): Xaa = Any Amino Acid
CCELACNXPACTXGXXA

SEQ ID NO: 8115 - protein, 15 aa, Artificial Sequence
  Synthetically generated peptide
  VARIANT (1)..(15): Xaa = Any Amino Acid
CCELACNXPACTGXA

SEQ ID NO: 8116 - protein, 16 aa, Artificial Sequence
  Synthetically generated peptide
  VARIANT (1)..(16): Xaa = Any Amino Acid
CCELACNXPACTGXXA

SEQ ID NO: 8117 - protein, 17 aa, Artificial Sequence
  Synthetically generated peptide
  VARIANT (1)..(17): Xaa = Any Amino Acid
CCELACNXPACTGXXXA

SEQ ID NO: 8118 - protein, 14 aa, Artificial Sequence
  Synthetically generated peptide
  VARIANT (1)..(14): Xaa = Any Amino Acid
CCELACNPXACTGA

SEQ ID NO: 8119 - protein, 15 aa, Artificial Sequence
  Synthetically generated peptide
  VARIANT (1)..(15): Xaa = Any Amino Acid
CCELACNPXXACTGA

SEQ ID NO: 8120 - protein, 16 aa, Artificial Sequence
  Synthetically generated peptide
  VARIANT (1)..(16): Xaa = Any Amino Acid
CCELACNPXXXACTGA

SEQ ID NO: 8121 - protein, 17 aa, Artificial Sequence
  Synthetically generated peptide
  VARIANT (1)..(17): Xaa = Any Amino Acid
CCELACNPXXXXACTGA

SEQ ID NO: 8122 - protein, 17 aa, Artificial Sequence
  Synthetically generated peptide
  VARIANT (1)..(17): Xaa = Any Amino Acid
CCELACNPXXXAXCTGA

SEQ ID NO: 8123 - protein, 17 aa, Artificial Sequence
  Synthetically generated peptide
  VARIANT (1)..(17): Xaa = Any Amino Acid
CCELACNPXXXACXTGA

SEQ ID NO: 8124 - protein, 17 aa, Artificial Sequence
  Synthetically generated peptide
  VARIANT (1)..(17): Xaa = Any Amino Acid
CCELACNPXXXACTXGA

SEQ ID NO: 8125 - protein, 17 aa, Artificial Sequence
  Synthetically generated peptide
  VARIANT (1)..(17): Xaa = Any Amino Acid
CCELACNPXXXACTGXA

SEQ ID NO: 8126 - protein, 16 aa, Artificial Sequence
  Synthetically generated peptide
  VARIANT (1)..(16): Xaa = Any Amino Acid
CCELACNPXXAXCTGA

SEQ ID NO: 8127 - protein, 17 aa, Artificial Sequence
  Synthetically generated peptide
  VARIANT (1)..(17): Xaa = Any Amino Acid
CCELACNPXXAXXCTGA

SEQ ID NO: 8128 - protein, 17 aa, Artificial Sequence
  Synthetically generated peptide
  VARIANT (1)..(17): Xaa = Any Amino Acid
CCELACNPXXAXCXTGA

SEQ ID NO: 8129 - protein, 17 aa, Artificial Sequence
  Synthetically generated peptide
  VARIANT (1)..(17): Xaa = Any Amino Acid
CCELACNPXXAXCTXGA

SEQ ID NO: 8130 - protein, 17 aa, Artificial Sequence
  Synthetically generated peptide
  VARIANT (1)..(17): Xaa = Any Amino Acid
CCELACNPXXAXCTGXA

SEQ ID NO: 8131 - protein, 16 aa, Artificial Sequence
  Synthetically generated peptide
  VARIANT (1)..(16): Xaa = Any Amino Acid
CCELACNPXXACXTGA

SEQ ID NO: 8132 - protein, 17 aa, Artificial Sequence
  Synthetically generated peptide
  VARIANT (1)..(17): Xaa = Any Amino Acid
CCELACNPXXACXXTGA

SEQ ID NO: 8133 - protein, 17 aa, Artificial Sequence
  Synthetically generated peptide
  VARIANT (1)..(17): Xaa = Any Amino Acid
CCELACNPXXACXTXGA

SEQ ID NO: 8134 - protein, 17 aa, Artificial Sequence
  Synthetically generated peptide
  VARIANT (1)..(17): Xaa = Any Amino Acid
CCELACNPXXACXTGXA

SEQ ID NO: 8135 - protein, 16 aa, Artificial Sequence
  Synthetically generated peptide
  VARIANT (1)..(16): Xaa = Any Amino Acid
CCELACNPXXACTXGA

SEQ ID NO: 8136 - protein, 17 aa, Artificial Sequence
  Synthetically generated peptide
  VARIANT (1)..(17): Xaa = Any Amino Acid
CCELACNPXXACTXXGA

SEQ ID NO: 8137 - protein, 17 aa, Artificial Sequence
  Synthetically generated peptide
  VARIANT (1)..(17): Xaa = Any Amino Acid
CCELACNPXXACTXGXA

SEQ ID NO: 8138 - protein, 16 aa, Artificial Sequence
  Synthetically generated peptide
  VARIANT (1)..(16): Xaa = Any Amino Acid
CCELACNPXXACTGXA

SEQ ID NO: 8139 - protein, 17 aa, Artificial Sequence
  Synthetically generated peptide
  VARIANT (1)..(17): Xaa = Any Amino Acid
CCELACNPXXACTGXXA

SEQ ID NO: 8140 - protein, 15 aa, Artificial Sequence
  Synthetically generated peptide
  VARIANT (1)..(15): Xaa = Any Amino Acid
CCELACNPXAXCTGA

SEQ ID NO: 8141 - protein, 16 aa, Artificial Sequence
  Synthetically generated peptide
  VARIANT (1)..(16): Xaa = Any Amino Acid
CCELACNPXAXXCTGA

SEQ ID NO: 8142 - protein, 17 aa, Artificial Sequence
  Synthetically generated peptide
  VARIANT (1)..(17): Xaa = Any Amino Acid
CCELACNPXAXXXCTGA

SEQ ID NO: 8143 - protein, 17 aa, Artificial Sequence
  Synthetically generated peptide
  VARIANT (1)..(17): Xaa = Any Amino Acid
CCELACNPXAXXCXTGA

SEQ ID NO: 8144 - protein, 17 aa, Artificial Sequence
  Synthetically generated peptide
  VARIANT (1)..(17): Xaa = Any Amino Acid
CCELACNPXAXXCTXGA

SEQ ID NO: 8145 - protein, 17 aa, Artificial Sequence
  Synthetically generated peptide
  VARIANT (1)..(17): Xaa = Any Amino Acid
CCELACNPXAXXCTGXA

SEQ ID NO: 8146 - protein, 16 aa, Artificial Sequence
  Synthetically generated peptide
  VARIANT (1)..(16): Xaa = Any Amino Acid
CCELACNPXAXCXTGA

SEQ ID NO: 8147 - protein, 17 aa, Artificial Sequence
  Synthetically generated peptide
  VARIANT (1)..(17): Xaa = Any Amino Acid
CCELACNPXAXCXXTGA

SEQ ID NO: 8148 - protein, 17 aa, Artificial Sequence
  Synthetically generated peptide
  VARIANT (1)..(17): Xaa = Any Amino Acid
CCELACNPXAXCXTXGA

SEQ ID NO: 8149 - protein, 17 aa, Artificial Sequence
  Synthetically generated peptide
  VARIANT (1)..(17): Xaa = Any Amino Acid
CCELACNPXAXCXTGXA

SEQ ID NO: 8150 - protein, 16 aa, Artificial Sequence
  Synthetically generated peptide
  VARIANT (1)..(16): Xaa = Any Amino Acid
CCELACNPXAXCTXGA

SEQ ID NO: 8151 - protein, 17 aa, Artificial Sequence
  Synthetically generated peptide
  VARIANT (1)..(17): Xaa = Any Amino Acid
CCELACNPXAXCTXXGA

SEQ ID NO: 8152 - protein, 17 aa, Artificial Sequence
  Synthetically generated peptide
  VARIANT (1)..(17): Xaa = Any Amino Acid
CCELACNPXAXCTXGXA

SEQ ID NO: 8153 - protein, 16 aa, Artificial Sequence
  Synthetically generated peptide
  VARIANT (1)..(16): Xaa = Any Amino Acid
CCELACNPXAXCTGXA

SEQ ID NO: 8154 - protein, 17 aa, Artificial Sequence
  Synthetically generated peptide
  VARIANT (1)..(17): Xaa = Any Amino Acid
CCELACNPXAXCTGXXA

SEQ ID NO: 8155 - protein, 15 aa, Artificial Sequence
  Synthetically generated peptide
  VARIANT (1)..(15): Xaa = Any Amino Acid
CCELACNPXACXTGA

SEQ ID NO: 8156 - protein, 16 aa, Artificial Sequence
  Synthetically generated peptide
  VARIANT (1)..(16): Xaa = Any Amino Acid
CCELACNPXACXXTGA

SEQ ID NO: 8157 - protein, 17 aa, Artificial Sequence
  Synthetically generated peptide
  VARIANT (1)..(17): Xaa = Any Amino Acid
CCELACNPXACXXXTGA

SEQ ID NO: 8158 - protein, 17 aa, Artificial Sequence
  Synthetically generated peptide
  VARIANT (1)..(17): Xaa = Any Amino Acid
CCELACNPXACXXTXGA

SEQ ID NO: 8159 - protein, 17 aa, Artificial Sequence
  Synthetically generated peptide
  VARIANT (1)..(17): Xaa = Any Amino Acid
CCELACNPXACXXTGXA

SEQ ID NO: 8160 - protein, 16 aa, Artificial Sequence
  Synthetically generated peptide
  VARIANT (1)..(16): Xaa = Any Amino Acid
CCELACNPXACXTXGA

SEQ ID NO: 8161 - protein, 17 aa, Artificial Sequence
  Synthetically generated peptide
  VARIANT (1)..(17): Xaa = Any Amino Acid
CCELACNPXACXTXXGA

SEQ ID NO: 8162 - protein, 17 aa, Artificial Sequence
  Synthetically generated peptide
  VARIANT (1)..(17): Xaa = Any Amino Acid
CCELACNPXACXTXGXA

SEQ ID NO: 8163 - protein, 16 aa, Artificial Sequence
  Synthetically generated peptide
  VARIANT (1)..(16): Xaa = Any Amino Acid
CCELACNPXACXTGXA

SEQ ID NO: 8164 - protein, 17 aa, Artificial Sequence
  Synthetically generated peptide
  VARIANT (1)..(17): Xaa = Any Amino Acid
CCELACNPXACXTGXXA

SEQ ID NO: 8165 - protein, 15 aa, Artificial Sequence
  Synthetically generated peptide
  VARIANT (1)..(15): Xaa = Any Amino Acid
CCELACNPXACTXGA

SEQ ID NO: 8166 - protein, 16 aa, Artificial Sequence
  Synthetically generated peptide
  VARIANT (1)..(16): Xaa = Any Amino Acid
CCELACNPXACTXXGA

SEQ ID NO: 8167 - protein, 17 aa, Artificial Sequence
  Synthetically generated peptide
  VARIANT (1)..(17): Xaa = Any Amino Acid
CCELACNPXACTXXXGA

SEQ ID NO: 8168 - protein, 17 aa, Artificial Sequence
  Synthetically generated peptide
  VARIANT (1)..(17): Xaa = Any Amino Acid
CCELACNPXACTXXGXA

SEQ ID NO: 8169 - protein, 16 aa, Artificial Sequence
  Synthetically generated peptide
  VARIANT (1)..(16): Xaa = Any Amino Acid
CCELACNPXACTXGXA

SEQ ID NO: 8170 - protein, 17 aa, Artificial Sequence
  Synthetically generated peptide
  VARIANT (1)..(17): Xaa = Any Amino Acid
CCELACNPXACTXGXXA

SEQ ID NO: 8171 - protein, 15 aa, Artificial Sequence
  Synthetically generated peptide
  VARIANT (1)..(15): Xaa = Any Amino Acid
CCELACNPXACTGXA

SEQ ID NO: 8172 - protein, 16 aa, Artificial Sequence
  Synthetically generated peptide
  VARIANT (1)..(16): Xaa = Any Amino Acid
CCELACNPXACTGXXA

SEQ ID NO: 8173 - protein, 17 aa, Artificial Sequence
  Synthetically generated peptide
  VARIANT (1)..(17): Xaa = Any Amino Acid
CCELACNPXACTGXXXA

SEQ ID NO: 8174 - protein, 14 aa, Artificial Sequence
  Synthetically generated peptide
  VARIANT (1)..(14): Xaa = Any Amino Acid
CCELACNPAXCTGA

SEQ ID NO: 8175 - protein, 15 aa, Artificial Sequence
  Synthetically generated peptide
  VARIANT (1)..(15): Xaa = Any Amino Acid
CCELACNPAXXCTGA

SEQ ID NO: 8176 - protein, 16 aa, Artificial Sequence
  Synthetically generated peptide
  VARIANT (1)..(16): Xaa = Any Amino Acid
CCELACNPAXXXCTGA

SEQ ID NO: 8177 - protein, 17 aa, Artificial Sequence
  Synthetically generated peptide
  VARIANT (1)..(17): Xaa = Any Amino Acid
CCELACNPAXXXXCTGA

SEQ ID NO: 8178 - protein, 17 aa, Artificial Sequence
  Synthetically generated peptide
  VARIANT (1)..(17): Xaa = Any Amino Acid
CCELACNPAXXXCXTGA

SEQ ID NO: 8179 - protein, 17 aa, Artificial Sequence
  Synthetically generated peptide
  VARIANT (1)..(17): Xaa = Any Amino Acid
CCELACNPAXXXCTXGA

SEQ ID NO: 8180 - protein, 17 aa, Artificial Sequence
  Synthetically generated peptide
  VARIANT (1)..(17): Xaa = Any Amino Acid
CCELACNPAXXXCTGXA

SEQ ID NO: 8181 - protein, 16 aa, Artificial Sequence
  Synthetically generated peptide
  VARIANT (1)..(16): Xaa = Any Amino Acid
CCELACNPAXXCXTGA

SEQ ID NO: 8182 - protein, 17 aa, Artificial Sequence
  Synthetically generated peptide
  VARIANT (1)..(17): Xaa = Any Amino Acid
CCELACNPAXXCXXTGA

SEQ ID NO: 8183 - protein, 17 aa, Artificial Sequence
  Synthetically generated peptide
  VARIANT (1)..(17): Xaa = Any Amino Acid
CCELACNPAXXCXTXGA

SEQ ID NO: 8184 - protein, 17 aa, Artificial Sequence
  Synthetically generated peptide
  VARIANT (1)..(17): Xaa = Any Amino Acid
CCELACNPAXXCXTGXA

SEQ ID NO: 8185 - protein, 16 aa, Artificial Sequence
  Synthetically generated peptide
  VARIANT (1)..(16): Xaa = Any Amino Acid
CCELACNPAXXCTXGA

SEQ ID NO: 8186 - protein, 17 aa, Artificial Sequence
  Synthetically generated peptide
  VARIANT (1)..(17): Xaa = Any Amino Acid
CCELACNPAXXCTXXGA

SEQ ID NO: 8187 - protein, 17 aa, Artificial Sequence
  Synthetically generated peptide
  VARIANT (1)..(17): Xaa = Any Amino Acid
CCELACNPAXXCTXGXA

SEQ ID NO: 8188 - protein, 16 aa, Artificial Sequence
  Synthetically generated peptide
  VARIANT (1)..(16): Xaa = Any Amino Acid
CCELACNPAXXCTGXA

SEQ ID NO: 8189 - protein, 17 aa, Artificial Sequence
  Synthetically generated peptide
  VARIANT (1)..(17): Xaa = Any Amino Acid
CCELACNPAXXCTGXXA

SEQ ID NO: 8190 - protein, 15 aa, Artificial Sequence
  Synthetically generated peptide
  VARIANT (1)..(15): Xaa = Any Amino Acid
CCELACNPAXCXTGA

SEQ ID NO: 8191 - protein, 16 aa, Artificial Sequence
  Synthetically generated peptide
  VARIANT (1)..(16): Xaa = Any Amino Acid
CCELACNPAXCXXTGA

SEQ ID NO: 8192 - protein, 17 aa, Artificial Sequence
  Synthetically generated peptide
  VARIANT (1)..(17): Xaa = Any Amino Acid
CCELACNPAXCXXXTGA

SEQ ID NO: 8193 - protein, 17 aa, Artificial Sequence
  Synthetically generated peptide
  VARIANT (1)..(17): Xaa = Any Amino Acid
CCELACNPAXCXXTXGA

SEQ ID NO: 8194 - protein, 17 aa, Artificial Sequence
  Synthetically generated peptide
  VARIANT (1)..(17): Xaa = Any Amino Acid
CCELACNPAXCXXTGXA

SEQ ID NO: 8195 - protein, 16 aa, Artificial Sequence
  Synthetically generated peptide
  VARIANT (1)..(16): Xaa = Any Amino Acid
CCELACNPAXCXTXGA

SEQ ID NO: 8196 - protein, 17 aa, Artificial Sequence
  Synthetically generated peptide
  VARIANT (1)..(17): Xaa = Any Amino Acid
CCELACNPAXCXTXXGA

SEQ ID NO: 8197 - protein, 17 aa, Artificial Sequence
  Synthetically generated peptide
  VARIANT (1)..(17): Xaa = Any Amino Acid
CCELACNPAXCXTXGXA

SEQ ID NO: 8198 - protein, 16 aa, Artificial Sequence
  Synthetically generated peptide
  VARIANT (1)..(16): Xaa = Any Amino Acid
CCELACNPAXCXTGXA

SEQ ID NO: 8199 - protein, 17 aa, Artificial Sequence
  Synthetically generated peptide
  VARIANT (1)..(17): Xaa = Any Amino Acid
CCELACNPAXCXTGXXA

SEQ ID NO: 8200 - protein, 15 aa, Artificial Sequence
  Synthetically generated peptide
  VARIANT (1)..(15): Xaa = Any Amino Acid
CCELACNPAXCTXGA

SEQ ID NO: 8201 - protein, 16 aa, Artificial Sequence
  Synthetically generated peptide
  VARIANT (1)..(16): Xaa = Any Amino Acid
CCELACNPAXCTXXGA

SEQ ID NO: 8202 - protein, 17 aa, Artificial Sequence
  Synthetically generated peptide
  VARIANT (1)..(17): Xaa = Any Amino Acid
CCELACNPAXCTXXXGA

SEQ ID NO: 8203 - protein, 17 aa, Artificial Sequence
  Synthetically generated peptide
  VARIANT (1)..(17): Xaa = Any Amino Acid
CCELACNPAXCTXXGXA

SEQ ID NO: 8204 - protein, 16 aa, Artificial Sequence
  Synthetically generated peptide
  VARIANT (1)..(16): Xaa = Any Amino Acid
CCELACNPAXCTXGXA

SEQ ID NO: 8205 - protein, 17 aa, Artificial Sequence
  Synthetically generated peptide
  VARIANT (1)..(17): Xaa = Any Amino Acid
CCELACNPAXCTXGXXA

SEQ ID NO: 8206 - protein, 15 aa, Artificial Sequence
  Synthetically generated peptide
  VARIANT (1)..(15): Xaa = Any Amino Acid
CCELACNPAXCTGXA

SEQ ID NO: 8207 - protein, 16 aa, Artificial Sequence
  Synthetically generated peptide
  VARIANT (1)..(16): Xaa = Any Amino Acid
CCELACNPAXCTGXXA

SEQ ID NO: 8208 - protein, 17 aa, Artificial Sequence
  Synthetically generated peptide
  VARIANT (1)..(17): Xaa = Any Amino Acid
CCELACNPAXCTGXXXA

SEQ ID NO: 8209 - protein, 14 aa, Artificial Sequence
  Synthetically generated peptide
  VARIANT (1)..(14): Xaa = Any Amino Acid
CCELACNPACXTGA

SEQ ID NO: 8210 - protein, 15 aa, Artificial Sequence
  Synthetically generated peptide
  VARIANT (1)..(15): Xaa = Any Amino Acid
CCELACNPACXXTGA

SEQ ID NO: 8211 - protein, 16 aa, Artificial Sequence
  Synthetically generated peptide
  VARIANT (1)..(16): Xaa = Any Amino Acid
CCELACNPACXXXTGA

SEQ ID NO: 8212 - protein, 17 aa, Artificial Sequence
  Synthetically generated peptide
  VARIANT (1)..(17): Xaa = Any Amino Acid
CCELACNPACXXXXTGA

SEQ ID NO: 8213 - protein, 17 aa, Artificial Sequence
  Synthetically generated peptide
  VARIANT (1)..(17): Xaa = Any Amino Acid
CCELACNPACXXXTXGA

SEQ ID NO: 8214 - protein, 17 aa, Artificial Sequence
  Synthetically generated peptide
  VARIANT (1)..(17): Xaa = Any Amino Acid
CCELACNPACXXXTGXA

SEQ ID NO: 8215 - protein, 16 aa, Artificial Sequence
  Synthetically generated peptide
  VARIANT (1)..(16): Xaa = Any Amino Acid
CCELACNPACXXTXGA

SEQ ID NO: 8216 - protein, 17 aa, Artificial Sequence
  Synthetically generated peptide
  VARIANT (1)..(17): Xaa = Any Amino Acid
CCELACNPACXXTXXGA

SEQ ID NO: 8217 - protein, 17 aa, Artificial Sequence
  Synthetically generated peptide
  VARIANT (1)..(17): Xaa = Any Amino Acid
CCELACNPACXXTXGXA

SEQ ID NO: 8218 - protein, 16 aa, Artificial Sequence
  Synthetically generated peptide
  VARIANT (1)..(16): Xaa = Any Amino Acid
CCELACNPACXXTGXA

SEQ ID NO: 8219 - protein, 17 aa, Artificial Sequence
  Synthetically generated peptide
  VARIANT (1)..(17): Xaa = Any Amino Acid
CCELACNPACXXTGXXA

SEQ ID NO: 8220 - protein, 15 aa, Artificial Sequence
  Synthetically generated peptide
  VARIANT (1)..(15): Xaa = Any Amino Acid
CCELACNPACXTXGA

SEQ ID NO: 8221 - protein, 16 aa, Artificial Sequence
  Synthetically generated peptide
  VARIANT (1)..(16): Xaa = Any Amino Acid
CCELACNPACXTXXGA

SEQ ID NO: 8222 - protein, 17 aa, Artificial Sequence
  Synthetically generated peptide
  VARIANT (1)..(17): Xaa = Any Amino Acid
CCELACNPACXTXXXGA

SEQ ID NO: 8223 - protein, 17 aa, Artificial Sequence
  Synthetically generated peptide
  VARIANT (1)..(17): Xaa = Any Amino Acid
CCELACNPACXTXXGXA

SEQ ID NO: 8224 - protein, 16 aa, Artificial Sequence
  Synthetically generated peptide
  VARIANT (1)..(16): Xaa = Any Amino Acid
CCELACNPACXTXGXA

SEQ ID NO: 8225 - protein, 17 aa, Artificial Sequence
  Synthetically generated peptide
  VARIANT (1)..(17): Xaa = Any Amino Acid
CCELACNPACXTXGXXA

SEQ ID NO: 8226 - protein, 15 aa, Artificial Sequence
  Synthetically generated peptide
  VARIANT (1)..(15): Xaa = Any Amino Acid
CCELACNPACXTGXA

SEQ ID NO: 8227 - protein, 16 aa, Artificial Sequence
  Synthetically generated peptide
  VARIANT (1)..(16): Xaa = Any Amino Acid
CCELACNPACXTGXXA

SEQ ID NO: 8228 - protein, 17 aa, Artificial Sequence
  Synthetically generated peptide
  VARIANT (1)..(17): Xaa = Any Amino Acid
CCELACNPACXTGXXXA

SEQ ID NO: 8229 - protein, 14 aa, Artificial Sequence
  Synthetically generated peptide
  VARIANT (1)..(14): Xaa = Any Amino Acid
CCELACNPACTXGA

SEQ ID NO: 8230 - protein, 15 aa, Artificial Sequence
  Synthetically generated peptide
  VARIANT (1)..(15): Xaa = Any Amino Acid
CCELACNPACTXXGA

SEQ ID NO: 8231 - protein, 16 aa, Artificial Sequence
  Synthetically generated peptide
  VARIANT (1)..(16): Xaa = Any Amino Acid
CCELACNPACTXXXGA

SEQ ID NO: 8232 - protein, 17 aa, Artificial Sequence
  Synthetically generated peptide
  VARIANT (1)..(17): Xaa = Any Amino Acid
CCELACNPACTXXXXGA

SEQ ID NO: 8233 - protein, 17 aa, Artificial Sequence
  Synthetically generated peptide
  VARIANT (1)..(17): Xaa = Any Amino Acid
CCELACNPACTXXXGXA

SEQ ID NO: 8234 - protein, 16 aa, Artificial Sequence
  Synthetically generated peptide
  VARIANT (1)..(16): Xaa = Any Amino Acid
CCELACNPACTXXGXA

SEQ ID NO: 8235 - protein, 17 aa, Artificial Sequence
  Synthetically generated peptide
  VARIANT (1)..(17): Xaa = Any Amino Acid
CCELACNPACTXXGXXA

SEQ ID NO: 8236 - protein, 15 aa, Artificial Sequence
  Synthetically generated peptide
  VARIANT (1)..(15): Xaa = Any Amino Acid
CCELACNPACTXGXA

SEQ ID NO: 8237 - protein, 16 aa, Artificial Sequence
  Synthetically generated peptide
  VARIANT (1)..(16): Xaa = Any Amino Acid
CCELACNPACTXGXXA

SEQ ID NO: 8238 - protein, 17 aa, Artificial Sequence
  Synthetically generated peptide
  VARIANT (1)..(17): Xaa = Any Amino Acid
CCELACNPACTXGXXXA

SEQ ID NO: 8239 - protein, 14 aa, Artificial Sequence
  Synthetically generated peptide
  VARIANT (1)..(14): Xaa = Any Amino Acid
CCELACNPACTGXA

SEQ ID NO: 8240 - protein, 15 aa, Artificial Sequence
  Synthetically generated peptide
  VARIANT (1)..(15): Xaa = Any Amino Acid
CCELACNPACTGXXA

SEQ ID NO: 8241 - protein, 16 aa, Artificial Sequence
  Synthetically generated peptide
  VARIANT (1)..(16): Xaa = Any Amino Acid
CCELACNPACTGXXXA

SEQ ID NO: 8242 - protein, 17 aa, Artificial Sequence
  Synthetically generated peptide
  VARIANT (1)..(17): Xaa = Any Amino Acid
CCELACNPACTGXXXXA

SEQ ID NO: 8243 - protein, 14 aa, Artificial Sequence
  Synthetically generated peptide
  VARIANT (1)..(14): Xaa = Any Amino Acid
ACXEYCANPACTGC

SEQ ID NO: 8244 - protein, 15 aa, Artificial Sequence
  Synthetically generated peptide
  VARIANT (1)..(15): Xaa = Any Amino Acid
ACXXEYCANPACTGC

SEQ ID NO: 8245 - protein, 16 aa, Artificial Sequence
  Synthetically generated peptide
  VARIANT (1)..(16): Xaa = Any Amino Acid
ACXXXEYCANPACTGC

SEQ ID NO: 8246 - protein, 17 aa, Artificial Sequence
  Synthetically generated peptide
  VARIANT (1)..(17): Xaa = Any Amino Acid
ACXXXXEYCANPACTGC

SEQ ID NO: 8247 - protein, 17 aa, Artificial Sequence
  Synthetically generated peptide
  VARIANT (1)..(17): Xaa = Any Amino Acid
ACXXXEXYCANPACTGC

SEQ ID NO: 8248 - protein, 17 aa, Artificial Sequence
  Synthetically generated peptide
  VARIANT (1)..(17): Xaa = Any Amino Acid
ACXXXEYXCANPACTGC

SEQ ID NO: 8249 - protein, 17 aa, Artificial Sequence
  Synthetically generated peptide
  VARIANT (1)..(17): Xaa = Any Amino Acid
ACXXXEYCAXNPACTGC

SEQ ID NO: 8250 - protein, 17 aa, Artificial Sequence
  Synthetically generated peptide
  VARIANT (1)..(17): Xaa = Any Amino Acid
ACXXXEYCANXPACTGC

SEQ ID NO: 8251 - protein, 17 aa, Artificial Sequence
  Synthetically generated peptide
  VARIANT (1)..(17): Xaa = Any Amino Acid
ACXXXEYCANPXACTGC

SEQ ID NO: 8252 - protein, 17 aa, Artificial Sequence
  Synthetically generated peptide
  VARIANT (1)..(17): Xaa = Any Amino Acid
ACXXXEYCANPAXCTGC

SEQ ID NO: 8253 - protein, 17 aa, Artificial Sequence
  Synthetically generated peptide
  VARIANT (1)..(17): Xaa = Any Amino Acid
ACXXXEYCANPACXTGC

SEQ ID NO: 8254 - protein, 17 aa, Artificial Sequence
  Synthetically generated peptide
  VARIANT (1)..(17): Xaa = Any Amino Acid
ACXXXEYCANPACTXGC

SEQ ID NO: 8255 - protein, 17 aa, Artificial Sequence
  Synthetically generated peptide
  VARIANT (1)..(17): Xaa = Any Amino Acid
ACXXXEYCANPACTGXC

SEQ ID NO: 8256 - protein, 16 aa, Artificial Sequence
  Synthetically generated peptide
  VARIANT (1)..(16): Xaa = Any Amino Acid
ACXXEXYCANPACTGC

SEQ ID NO: 8257 - protein, 17 aa, Artificial Sequence
  Synthetically generated peptide
  VARIANT (1)..(17): Xaa = Any Amino Acid
ACXXEXXYCANPACTGC

SEQ ID NO: 8258 - protein, 17 aa, Artificial Sequence
  Synthetically generated peptide
  VARIANT (1)..(17): Xaa = Any Amino Acid
ACXXEXYXCANPACTGC

SEQ ID NO: 8259 - protein, 17 aa, Artificial Sequence
  Synthetically generated peptide
  VARIANT (1)..(17): Xaa = Any Amino Acid
ACXXEXYCAXNPACTGC

SEQ ID NO: 8260 - protein, 17 aa, Artificial Sequence
  Synthetically generated peptide
  VARIANT (1)..(17): Xaa = Any Amino Acid
ACXXEXYCANXPACTGC

SEQ ID NO: 8261 - protein, 17 aa, Artificial Sequence
  Synthetically generated peptide
  VARIANT (1)..(17): Xaa = Any Amino Acid
ACXXEXYCANPXACTGC

SEQ ID NO: 8262 - protein, 17 aa, Artificial Sequence
  Synthetically generated peptide
  VARIANT (1)..(17): Xaa = Any Amino Acid
ACXXEXYCANPAXCTGC

SEQ ID NO: 8263 - protein, 17 aa, Artificial Sequence
  Synthetically generated peptide
  VARIANT (1)..(17): Xaa = Any Amino Acid
ACXXEXYCANPACXTGC

SEQ ID NO: 8264 - protein, 17 aa, Artificial Sequence
  Synthetically generated peptide
  VARIANT (1)..(17): Xaa = Any Amino Acid
ACXXEXYCANPACTXGC

SEQ ID NO: 8265 - protein, 17 aa, Artificial Sequence
  Synthetically generated peptide
  VARIANT (1)..(17): Xaa = Any Amino Acid
ACXXEXYCANPACTGXC

SEQ ID NO: 8266 - protein, 16 aa, Artificial Sequence
  Synthetically generated peptide
  VARIANT (1)..(16): Xaa = Any Amino Acid
ACXXEYXCANPACTGC

SEQ ID NO: 8267 - protein, 17 aa, Artificial Sequence
  Synthetically generated peptide
  VARIANT (1)..(17): Xaa = Any Amino Acid
ACXXEYXXCANPACTGC

SEQ ID NO: 8268 - protein, 17 aa, Artificial Sequence
  Synthetically generated peptide
  VARIANT (1)..(17): Xaa = Any Amino Acid
ACXXEYXCAXNPACTGC

SEQ ID NO: 8269 - protein, 17 aa, Artificial Sequence
  Synthetically generated peptide
  VARIANT (1)..(17): Xaa = Any Amino Acid
ACXXEYXCANXPACTGC

SEQ ID NO: 8270 - protein, 17 aa, Artificial Sequence
  Synthetically generated peptide
  VARIANT (1)..(17): Xaa = Any Amino Acid
ACXXEYXCANPXACTGC

SEQ ID NO: 8271 - protein, 17 aa, Artificial Sequence
  Synthetically generated peptide
  VARIANT (1)..(17): Xaa = Any Amino Acid
ACXXEYXCANPAXCTGC

SEQ ID NO: 8272 - protein, 17 aa, Artificial Sequence
  Synthetically generated peptide
  VARIANT (1)..(17): Xaa = Any Amino Acid
ACXXEYXCANPACXTGC

SEQ ID NO: 8273 - protein, 17 aa, Artificial Sequence
  Synthetically generated peptide
  VARIANT (1)..(17): Xaa = Any Amino Acid
ACXXEYXCANPACTXGC

SEQ ID NO: 8274 - protein, 17 aa, Artificial Sequence
  Synthetically generated peptide
  VARIANT (1)..(17): Xaa = Any Amino Acid
ACXXEYXCANPACTGXC

SEQ ID NO: 8275 - protein, 16 aa, Artificial Sequence
  Synthetically generated peptide
  VARIANT (1)..(16): Xaa = Any Amino Acid
ACXXEYCAXNPACTGC

SEQ ID NO: 8276 - protein, 17 aa, Artificial Sequence
  Synthetically generated peptide
  VARIANT (1)..(17): Xaa = Any Amino Acid
ACXXEYCAXXNPACTGC

SEQ ID NO: 8277 - protein, 17 aa, Artificial Sequence
  Synthetically generated peptide
  VARIANT (1)..(17): Xaa = Any Amino Acid
ACXXEYCAXNXPACTGC

SEQ ID NO: 8278 - protein, 17 aa, Artificial Sequence
  Synthetically generated peptide
  VARIANT (1)..(17): Xaa = Any Amino Acid
ACXXEYCAXNPXACTGC

SEQ ID NO: 8279 - protein, 17 aa, Artificial Sequence
  Synthetically generated peptide
  VARIANT (1)..(17): Xaa = Any Amino Acid
ACXXEYCAXNPAXCTGC

SEQ ID NO: 8280 - protein, 17 aa, Artificial Sequence
  Synthetically generated peptide
  VARIANT (1)..(17): Xaa = Any Amino Acid
ACXXEYCAXNPACXTGC

SEQ ID NO: 8281 - protein, 17 aa, Artificial Sequence
  Synthetically generated peptide
  VARIANT (1)..(17): Xaa = Any Amino Acid
ACXXEYCAXNPACTXGC

SEQ ID NO: 8282 - protein, 17 aa, Artificial Sequence
  Synthetically generated peptide
  VARIANT (1)..(17): Xaa = Any Amino Acid
ACXXEYCAXNPACTGXC

SEQ ID NO: 8283 - protein, 16 aa, Artificial Sequence
  Synthetically generated peptide
  VARIANT (1)..(16): Xaa = Any Amino Acid
ACXXEYCANXPACTGC

SEQ ID NO: 8284 - protein, 17 aa, Artificial Sequence
  Synthetically generated peptide
  VARIANT (1)..(17): Xaa = Any Amino Acid
ACXXEYCANXXPACTGC

SEQ ID NO: 8285 - protein, 17 aa, Artificial Sequence
  Synthetically generated peptide
  VARIANT (1)..(17): Xaa = Any Amino Acid
ACXXEYCANXPXACTGC

SEQ ID NO: 8286 - protein, 17 aa, Artificial Sequence
  Synthetically generated peptide
  VARIANT (1)..(17): Xaa = Any Amino Acid
ACXXEYCANXPAXCTGC

SEQ ID NO: 8287 - protein, 17 aa, Artificial Sequence
  Synthetically generated peptide
  VARIANT (1)..(17): Xaa = Any Amino Acid
ACXXEYCANXPACXTGC

SEQ ID NO: 8288 - protein, 17 aa, Artificial Sequence
  Synthetically generated peptide
  VARIANT (1)..(17): Xaa = Any Amino Acid
ACXXEYCANXPACTXGC

SEQ ID NO: 8289 - protein, 17 aa, Artificial Sequence
  Synthetically generated peptide
  VARIANT (1)..(17): Xaa = Any Amino Acid
ACXXEYCANXPACTGXC

SEQ ID NO: 8290 - protein, 16 aa, Artificial Sequence
  Synthetically generated peptide
  VARIANT (1)..(16): Xaa = Any Amino Acid
ACXXEYCANPXACTGC

SEQ ID NO: 8291 - protein, 17 aa, Artificial Sequence
  Synthetically generated peptide
  VARIANT (1)..(17): Xaa = Any Amino Acid
ACXXEYCANPXXACTGC

SEQ ID NO: 8292 - protein, 17 aa, Artificial Sequence
  Synthetically generated peptide
  VARIANT (1)..(17): Xaa = Any Amino Acid
ACXXEYCANPXAXCTGC

SEQ ID NO: 8293 - protein, 17 aa, Artificial Sequence
  Synthetically generated peptide
  VARIANT (1)..(17): Xaa = Any Amino Acid
ACXXEYCANPXACXTGC

SEQ ID NO: 8294 - protein, 17 aa, Artificial Sequence
  Synthetically generated peptide
  VARIANT (1)..(17): Xaa = Any Amino Acid
ACXXEYCANPXACTXGC

SEQ ID NO: 8295 - protein, 17 aa, Artificial Sequence
  Synthetically generated peptide
  VARIANT (1)..(17): Xaa = Any Amino Acid
ACXXEYCANPXACTGXC

SEQ ID NO: 8296 - protein, 16 aa, Artificial Sequence
  Synthetically generated peptide
  VARIANT (1)..(16): Xaa = Any Amino Acid
ACXXEYCANPAXCTGC

SEQ ID NO: 8297 - protein, 17 aa, Artificial Sequence
  Synthetically generated peptide
  VARIANT (1)..(17): Xaa = Any Amino Acid
ACXXEYCANPAXXCTGC

SEQ ID NO: 8298 - protein, 17 aa, Artificial Sequence
  Synthetically generated peptide
  VARIANT (1)..(17): Xaa = Any Amino Acid
ACXXEYCANPAXCXTGC

SEQ ID NO: 8299 - protein, 17 aa, Artificial Sequence
  Synthetically generated peptide
  VARIANT (1)..(17): Xaa = Any Amino Acid
ACXXEYCANPAXCTXGC

SEQ ID NO: 8300 - protein, 17 aa, Artificial Sequence
  Synthetically generated peptide
  VARIANT (1)..(17): Xaa = Any Amino Acid
ACXXEYCANPAXCTGXC

SEQ ID NO: 8301 - protein, 16 aa, Artificial Sequence
  Synthetically generated peptide
  VARIANT (1)..(16): Xaa = Any Amino Acid
ACXXEYCANPACXTGC

SEQ ID NO: 8302 - protein, 17 aa, Artificial Sequence
  Synthetically generated peptide
  VARIANT (1)..(17): Xaa = Any Amino Acid
ACXXEYCANPACXXTGC

SEQ ID NO: 8303 - protein, 17 aa, Artificial Sequence
  Synthetically generated peptide
  VARIANT (1)..(17): Xaa = Any Amino Acid
ACXXEYCANPACXTXGC

SEQ ID NO: 8304 - protein, 17 aa, Artificial Sequence
  Synthetically generated peptide
  VARIANT (1)..(17): Xaa = Any Amino Acid
ACXXEYCANPACXTGXC

SEQ ID NO: 8305 - protein, 16 aa, Artificial Sequence
  Synthetically generated peptide
  VARIANT (1)..(16): Xaa = Any Amino Acid
ACXXEYCANPACTXGC

SEQ ID NO: 8306 - protein, 17 aa, Artificial Sequence
  Synthetically generated peptide
  VARIANT (1)..(17): Xaa = Any Amino Acid
ACXXEYCANPACTXXGC

SEQ ID NO: 8307 - protein, 17 aa, Artificial Sequence
  Synthetically generated peptide
  VARIANT (1)..(17): Xaa = Any Amino Acid
ACXXEYCANPACTXGXC

SEQ ID NO: 8308 - protein, 16 aa, Artificial Sequence
  Synthetically generated peptide
  VARIANT (1)..(16): Xaa = Any Amino Acid
ACXXEYCANPACTGXC

SEQ ID NO: 8309 - protein, 17 aa, Artificial Sequence
  Synthetically generated peptide
  VARIANT (1)..(17): Xaa = Any Amino Acid
ACXXEYCANPACTGXXC

SEQ ID NO: 8310 - protein, 15 aa, Artificial Sequence
  Synthetically generated peptide
  VARIANT (1)..(15): Xaa = Any Amino Acid
ACXEXYCANPACTGC

SEQ ID NO: 8311 - protein, 16 aa, Artificial Sequence
  Synthetically generated peptide
  VARIANT (1)..(16): Xaa = Any Amino Acid
ACXEXXYCANPACTGC

SEQ ID NO: 8312 - protein, 17 aa, Artificial Sequence
  Synthetically generated peptide
  VARIANT (1)..(17): Xaa = Any Amino Acid
ACXEXXXYCANPACTGC

SEQ ID NO: 8313 - protein, 17 aa, Artificial Sequence
  Synthetically generated peptide
  VARIANT (1)..(17): Xaa = Any Amino Acid
ACXEXXYXCANPACTGC

SEQ ID NO: 8314 - protein, 17 aa, Artificial Sequence
  Synthetically generated peptide
  VARIANT (1)..(17): Xaa = Any Amino Acid
ACXEXXYCAXNPACTGC

SEQ ID NO: 8315 - protein, 17 aa, Artificial Sequence
  Synthetically generated peptide
  VARIANT (1)..(17): Xaa = Any Amino Acid
ACXEXXYCANXPACTGC

SEQ ID NO: 8316 - protein, 17 aa, Artificial Sequence
  Synthetically generated peptide
  VARIANT (1)..(17): Xaa = Any Amino Acid
ACXEXXYCANPXACTGC

SEQ ID NO: 8317 - protein, 17 aa, Artificial Sequence
  Synthetically generated peptide
  VARIANT (1)..(17): Xaa = Any Amino Acid
ACXEXXYCANPAXCTGC

SEQ ID NO: 8318 - protein, 17 aa, Artificial Sequence
  Synthetically generated peptide
  VARIANT (1)..(17): Xaa = Any Amino Acid
ACXEXXYCANPACXTGC

SEQ ID NO: 8319 - protein, 17 aa, Artificial Sequence
  Synthetically generated peptide
  VARIANT (1)..(17): Xaa = Any Amino Acid
ACXEXXYCANPACTXGC

SEQ ID NO: 8320 - protein, 17 aa, Artificial Sequence
  Synthetically generated peptide
  VARIANT (1)..(17): Xaa = Any Amino Acid
ACXEXXYCANPACTGXC

SEQ ID NO: 8321 - protein, 16 aa, Artificial Sequence
  Synthetically generated peptide
  VARIANT (1)..(16): Xaa = Any Amino Acid
ACXEXYXCANPACTGC

SEQ ID NO: 8322 - protein, 17 aa, Artificial Sequence
  Synthetically generated peptide
  VARIANT (1)..(17): Xaa = Any Amino Acid
ACXEXYXXCANPACTGC

SEQ ID NO: 8323 - protein, 17 aa, Artificial Sequence
  Synthetically generated peptide
  VARIANT (1)..(17): Xaa = Any Amino Acid
ACXEXYXCAXNPACTGC

SEQ ID NO: 8324 - protein, 17 aa, Artificial Sequence
  Synthetically generated peptide
  VARIANT (1)..(17): Xaa = Any Amino Acid
ACXEXYXCANXPACTGC

SEQ ID NO: 8325 - protein, 17 aa, Artificial Sequence
  Synthetically generated peptide
  VARIANT (1)..(17): Xaa = Any Amino Acid
ACXEXYXCANPXACTGC

SEQ ID NO: 8326 - protein, 17 aa, Artificial Sequence
  Synthetically generated peptide
  VARIANT (1)..(17): Xaa = Any Amino Acid
ACXEXYXCANPAXCTGC

SEQ ID NO: 8327 - protein, 17 aa, Artificial Sequence
  Synthetically generated peptide
  VARIANT (1)..(17): Xaa = Any Amino Acid
ACXEXYXCANPACXTGC

SEQ ID NO: 8328 - protein, 17 aa, Artificial Sequence
  Synthetically generated peptide
  VARIANT (1)..(17): Xaa = Any Amino Acid
ACXEXYXCANPACTXGC

SEQ ID NO: 8329 - protein, 17 aa, Artificial Sequence
  Synthetically generated peptide
  VARIANT (1)..(17): Xaa = Any Amino Acid
ACXEXYXCANPACTGXC

SEQ ID NO: 8330 - protein, 16 aa, Artificial Sequence
  Synthetically generated peptide
  VARIANT (1)..(16): Xaa = Any Amino Acid
ACXEXYCAXNPACTGC

SEQ ID NO: 8331 - protein, 17 aa, Artificial Sequence
  Synthetically generated peptide
  VARIANT (1)..(17): Xaa = Any Amino Acid
ACXEXYCAXXNPACTGC

SEQ ID NO: 8332 - protein, 17 aa, Artificial Sequence
  Synthetically generated peptide
  VARIANT (1)..(17): Xaa = Any Amino Acid
ACXEXYCAXNXPACTGC

SEQ ID NO: 8333 - protein, 17 aa, Artificial Sequence
  Synthetically generated peptide
  VARIANT (1)..(17): Xaa = Any Amino Acid
ACXEXYCAXNPXACTGC

SEQ ID NO: 8334 - protein, 17 aa, Artificial Sequence
  Synthetically generated peptide
  VARIANT (1)..(17): Xaa = Any Amino Acid
ACXEXYCAXNPAXCTGC

SEQ ID NO: 8335 - protein, 17 aa, Artificial Sequence
  Synthetically generated peptide
  VARIANT (1)..(17): Xaa = Any Amino Acid
ACXEXYCAXNPACXTGC

SEQ ID NO: 8336 - protein, 17 aa, Artificial Sequence
  Synthetically generated peptide
  VARIANT (1)..(17): Xaa = Any Amino Acid
ACXEXYCAXNPACTXGC

SEQ ID NO: 8337 - protein, 17 aa, Artificial Sequence
  Synthetically generated peptide
  VARIANT (1)..(17): Xaa = Any Amino Acid
ACXEXYCAXNPACTGXC

SEQ ID NO: 8338 - protein, 16 aa, Artificial Sequence
  Synthetically generated peptide
  VARIANT (1)..(16): Xaa = Any Amino Acid
ACXEXYCANXPACTGC

SEQ ID NO: 8339 - protein, 17 aa, Artificial Sequence
  Synthetically generated peptide
  VARIANT (1)..(17): Xaa = Any Amino Acid
ACXEXYCANXXPACTGC

SEQ ID NO: 8340 - protein, 17 aa, Artificial Sequence
  Synthetically generated peptide
  VARIANT (1)..(17): Xaa = Any Amino Acid
ACXEXYCANXPXACTGC

SEQ ID NO: 8341 - protein, 17 aa, Artificial Sequence
  Synthetically generated peptide
  VARIANT (1)..(17): Xaa = Any Amino Acid
ACXEXYCANXPAXCTGC

SEQ ID NO: 8342 - protein, 17 aa, Artificial Sequence
  Synthetically generated peptide
  VARIANT (1)..(17): Xaa = Any Amino Acid
ACXEXYCANXPACXTGC

SEQ ID NO: 8343 - protein, 17 aa, Artificial Sequence
  Synthetically generated peptide
  VARIANT (1)..(17): Xaa = Any Amino Acid
ACXEXYCANXPACTXGC

SEQ ID NO: 8344 - protein, 17 aa, Artificial Sequence
  Synthetically generated peptide
  VARIANT (1)..(17): Xaa = Any Amino Acid
ACXEXYCANXPACTGXC

SEQ ID NO: 8345 - protein, 16 aa, Artificial Sequence
  Synthetically generated peptide
  VARIANT (1)..(16): Xaa = Any Amino Acid
ACXEXYCANPXACTGC

SEQ ID NO: 8346 - protein, 17 aa, Artificial Sequence
  Synthetically generated peptide
  VARIANT (1)..(17): Xaa = Any Amino Acid
ACXEXYCANPXXACTGC

SEQ ID NO: 8347 - protein, 17 aa, Artificial Sequence
  Synthetically generated peptide
  VARIANT (1)..(17): Xaa = Any Amino Acid
ACXEXYCANPXAXCTGC

SEQ ID NO: 8348 - protein, 17 aa, Artificial Sequence
  Synthetically generated peptide
  VARIANT (1)..(17): Xaa = Any Amino Acid
ACXEXYCANPXACXTGC

SEQ ID NO: 8349 - protein, 17 aa, Artificial Sequence
  Synthetically generated peptide
  VARIANT (1)..(17): Xaa = Any Amino Acid
ACXEXYCANPXACTXGC

SEQ ID NO: 8350 - protein, 17 aa, Artificial Sequence
  Synthetically generated peptide
  VARIANT (1)..(17): Xaa = Any Amino Acid
ACXEXYCANPXACTGXC

SEQ ID NO: 8351 - protein, 16 aa, Artificial Sequence
  Synthetically generated peptide
  VARIANT (1)..(16): Xaa = Any Amino Acid
ACXEXYCANPAXCTGC

SEQ ID NO: 8352 - protein, 17 aa, Artificial Sequence
  Synthetically generated peptide
  VARIANT (1)..(17): Xaa = Any Amino Acid
ACXEXYCANPAXXCTGC

SEQ ID NO: 8353 - protein, 17 aa, Artificial Sequence
  Synthetically generated peptide
  VARIANT (1)..(17): Xaa = Any Amino Acid
ACXEXYCANPAXCXTGC

SEQ ID NO: 8354 - protein, 17 aa, Artificial Sequence
  Synthetically generated peptide
  VARIANT (1)..(17): Xaa = Any Amino Acid
ACXEXYCANPAXCTXGC

SEQ ID NO: 8355 - protein, 17 aa, Artificial Sequence
  Synthetically generated peptide
  VARIANT (1)..(17): Xaa = Any Amino Acid
ACXEXYCANPAXCTGXC

SEQ ID NO: 8356 - protein, 16 aa, Artificial Sequence
  Synthetically generated peptide
  VARIANT (1)..(16): Xaa = Any Amino Acid
ACXEXYCANPACXTGC

SEQ ID NO: 8357 - protein, 17 aa, Artificial Sequence
  Synthetically generated peptide
  VARIANT (1)..(17): Xaa = Any Amino Acid
ACXEXYCANPACXXTGC

SEQ ID NO: 8358 - protein, 17 aa, Artificial Sequence
  Synthetically generated peptide
  VARIANT (1)..(17): Xaa = Any Amino Acid
ACXEXYCANPACXTXGC

SEQ ID NO: 8359 - protein, 17 aa, Artificial Sequence
  Synthetically generated peptide
  VARIANT (1)..(17): Xaa = Any Amino Acid
ACXEXYCANPACXTGXC

SEQ ID NO: 8360 - protein, 16 aa, Artificial Sequence
  Synthetically generated peptide
  VARIANT (1)..(16): Xaa = Any Amino Acid
ACXEXYCANPACTXGC

SEQ ID NO: 8361 - protein, 17 aa, Artificial Sequence
  Synthetically generated peptide
  VARIANT (1)..(17): Xaa = Any Amino Acid
ACXEXYCANPACTXXGC

SEQ ID NO: 8362 - protein, 17 aa, Artificial Sequence
  Synthetically generated peptide
  VARIANT (1)..(17): Xaa = Any Amino Acid
ACXEXYCANPACTXGXC

SEQ ID NO: 8363 - protein, 16 aa, Artificial Sequence
  Synthetically generated peptide
  VARIANT (1)..(16): Xaa = Any Amino Acid
ACXEXYCANPACTGXC

SEQ ID NO: 8364 - protein, 17 aa, Artificial Sequence
  Synthetically generated peptide
  VARIANT (1)..(17): Xaa = Any Amino Acid
ACXEXYCANPACTGXXC

SEQ ID NO: 8365 - protein, 15 aa, Artificial Sequence
  Synthetically generated peptide
  VARIANT (1)..(15): Xaa = Any Amino Acid
ACXEYXCANPACTGC

SEQ ID NO: 8366 - protein, 16 aa, Artificial Sequence
  Synthetically generated peptide
  VARIANT (1)..(16): Xaa = Any Amino Acid
ACXEYXXCANPACTGC

SEQ ID NO: 8367 - protein, 17 aa, Artificial Sequence
  Synthetically generated peptide
  VARIANT (1)..(17): Xaa = Any Amino Acid
ACXEYXXXCANPACTGC

SEQ ID NO: 8368 - protein, 17 aa, Artificial Sequence
  Synthetically generated peptide
  VARIANT (1)..(17): Xaa = Any Amino Acid
ACXEYXXCAXNPACTGC

SEQ ID NO: 8369 - protein, 17 aa, Artificial Sequence
  Synthetically generated peptide
  VARIANT (1)..(17): Xaa = Any Amino Acid
ACXEYXXCANXPACTGC

SEQ ID NO: 8370 - protein, 17 aa, Artificial Sequence
  Synthetically generated peptide
  VARIANT (1)..(17): Xaa = Any Amino Acid
ACXEYXXCANPXACTGC

SEQ ID NO: 8371 - protein, 17 aa, Artificial Sequence
  Synthetically generated peptide
  VARIANT (1)..(17): Xaa = Any Amino Acid
ACXEYXXCANPAXCTGC

SEQ ID NO: 8372 - protein, 17 aa, Artificial Sequence
  Synthetically generated peptide
  VARIANT (1)..(17): Xaa = Any Amino Acid
ACXEYXXCANPACXTGC

SEQ ID NO: 8373 - protein, 17 aa, Artificial Sequence
  Synthetically generated peptide
  VARIANT (1)..(17): Xaa = Any Amino Acid
ACXEYXXCANPACTXGC

SEQ ID NO: 8374 - protein, 17 aa, Artificial Sequence
  Synthetically generated peptide
  VARIANT (1)..(17): Xaa = Any Amino Acid
ACXEYXXCANPACTGXC

SEQ ID NO: 8375 - protein, 16 aa, Artificial Sequence
  Synthetically generated peptide
  VARIANT (1)..(16): Xaa = Any Amino Acid
ACXEYXCAXNPACTGC

SEQ ID NO: 8376 - protein, 17 aa, Artificial Sequence
  Synthetically generated peptide
  VARIANT (1)..(17): Xaa = Any Amino Acid
ACXEYXCAXXNPACTGC

SEQ ID NO: 8377 - protein, 17 aa, Artificial Sequence
  Synthetically generated peptide
  VARIANT (1)..(17): Xaa = Any Amino Acid
ACXEYXCAXNXPACTGC

SEQ ID NO: 8378 - protein, 17 aa, Artificial Sequence
  Synthetically generated peptide
  VARIANT (1)..(17): Xaa = Any Amino Acid
ACXEYXCAXNPXACTGC

SEQ ID NO: 8379 - protein, 17 aa, Artificial Sequence
  Synthetically generated peptide
  VARIANT (1)..(17): Xaa = Any Amino Acid
ACXEYXCAXNPAXCTGC

SEQ ID NO: 8380 - protein, 17 aa, Artificial Sequence
  Synthetically generated peptide
  VARIANT (1)..(17): Xaa = Any Amino Acid
ACXEYXCAXNPACXTGC

SEQ ID NO: 8381 - protein, 17 aa, Artificial Sequence
  Synthetically generated peptide
  VARIANT (1)..(17): Xaa = Any Amino Acid
ACXEYXCAXNPACTXGC

SEQ ID NO: 8382 - protein, 17 aa, Artificial Sequence
  Synthetically generated peptide
  VARIANT (1)..(17): Xaa = Any Amino Acid
ACXEYXCAXNPACTGXC

SEQ ID NO: 8383 - protein, 16 aa, Artificial Sequence
  Synthetically generated peptide
  VARIANT (1)..(16): Xaa = Any Amino Acid
ACXEYXCANXPACTGC

SEQ ID NO: 8384 - protein, 17 aa, Artificial Sequence
  Synthetically generated peptide
  VARIANT (1)..(17): Xaa = Any Amino Acid
ACXEYXCANXXPACTGC

SEQ ID NO: 8385 - protein, 17 aa, Artificial Sequence
  Synthetically generated peptide
  VARIANT (1)..(17): Xaa = Any Amino Acid
ACXEYXCANXPXACTGC

SEQ ID NO: 8386 - protein, 17 aa, Artificial Sequence
  Synthetically generated peptide
  VARIANT (1)..(17): Xaa = Any Amino Acid
ACXEYXCANXPAXCTGC

SEQ ID NO: 8387 - protein, 17 aa, Artificial Sequence
  Synthetically generated peptide
  VARIANT (1)..(17): Xaa = Any Amino Acid
ACXEYXCANXPACXTGC

SEQ ID NO: 8388 - protein, 17 aa, Artificial Sequence
  Synthetically generated peptide
  VARIANT (1)..(17): Xaa = Any Amino Acid
ACXEYXCANXPACTXGC

SEQ ID NO: 8389 - protein, 17 aa, Artificial Sequence
  Synthetically generated peptide
  VARIANT (1)..(17): Xaa = Any Amino Acid
ACXEYXCANXPACTGXC

SEQ ID NO: 8390 - protein, 16 aa, Artificial Sequence
  Synthetically generated peptide
  VARIANT (1)..(16): Xaa = Any Amino Acid
ACXEYXCANPXACTGC

SEQ ID NO: 8391 - protein, 17 aa, Artificial Sequence
  Synthetically generated peptide
  VARIANT (1)..(17): Xaa = Any Amino Acid
ACXEYXCANPXXACTGC

SEQ ID NO: 8392 - protein, 17 aa, Artificial Sequence
  Synthetically generated peptide
  VARIANT (1)..(17): Xaa = Any Amino Acid
ACXEYXCANPXAXCTGC

SEQ ID NO: 8393 - protein, 17 aa, Artificial Sequence
  Synthetically generated peptide
  VARIANT (1)..(17): Xaa = Any Amino Acid
ACXEYXCANPXACXTGC

SEQ ID NO: 8394 - protein, 17 aa, Artificial Sequence
  Synthetically generated peptide
  VARIANT (1)..(17): Xaa = Any Amino Acid
ACXEYXCANPXACTXGC

SEQ ID NO: 8395 - protein, 17 aa, Artificial Sequence
  Synthetically generated peptide
  VARIANT (1)..(17): Xaa = Any Amino Acid
ACXEYXCANPXACTGXC

SEQ ID NO: 8396 - protein, 16 aa, Artificial Sequence
  Synthetically generated peptide
  VARIANT (1)..(16): Xaa = Any Amino Acid
ACXEYXCANPAXCTGC

SEQ ID NO: 8397 - protein, 17 aa, Artificial Sequence
  Synthetically generated peptide
  VARIANT (1)..(17): Xaa = Any Amino Acid
ACXEYXCANPAXXCTGC

SEQ ID NO: 8398 - protein, 17 aa, Artificial Sequence
  Synthetically generated peptide
  VARIANT (1)..(17): Xaa = Any Amino Acid
ACXEYXCANPAXCXTGC

SEQ ID NO: 8399 - protein, 17 aa, Artificial Sequence
  Synthetically generated peptide
  VARIANT (1)..(17): Xaa = Any Amino Acid
ACXEYXCANPAXCTXGC

SEQ ID NO: 8400 - protein, 17 aa, Artificial Sequence
  Synthetically generated peptide
  VARIANT (1)..(17): Xaa = Any Amino Acid
ACXEYXCANPAXCTGXC

SEQ ID NO: 8401 - protein, 16 aa, Artificial Sequence
  Synthetically generated peptide
  VARIANT (1)..(16): Xaa = Any Amino Acid
ACXEYXCANPACXTGC

SEQ ID NO: 8402 - protein, 17 aa, Artificial Sequence
  Synthetically generated peptide
  VARIANT (1)..(17): Xaa = Any Amino Acid
ACXEYXCANPACXXTGC

SEQ ID NO: 8403 - protein, 17 aa, Artificial Sequence
  Synthetically generated peptide
  VARIANT (1)..(17): Xaa = Any Amino Acid
ACXEYXCANPACXTXGC

SEQ ID NO: 8404 - protein, 17 aa, Artificial Sequence
  Synthetically generated peptide
  VARIANT (1)..(17): Xaa = Any Amino Acid
ACXEYXCANPACXTGXC

SEQ ID NO: 8405 - protein, 16 aa, Artificial Sequence
  Synthetically generated peptide
  VARIANT (1)..(16): Xaa = Any Amino Acid
ACXEYXCANPACTXGC

SEQ ID NO: 8406 - protein, 17 aa, Artificial Sequence
  Synthetically generated peptide
  VARIANT (1)..(17): Xaa = Any Amino Acid
ACXEYXCANPACTXXGC

SEQ ID NO: 8407 - protein, 17 aa, Artificial Sequence
  Synthetically generated peptide
  VARIANT (1)..(17): Xaa = Any Amino Acid
ACXEYXCANPACTXGXC

SEQ ID NO: 8408 - protein, 16 aa, Artificial Sequence
  Synthetically generated peptide
  VARIANT (1)..(16): Xaa = Any Amino Acid
ACXEYXCANPACTGXC

SEQ ID NO: 8409 - protein, 17 aa, Artificial Sequence
  Synthetically generated peptide
  VARIANT (1)..(17): Xaa = Any Amino Acid
ACXEYXCANPACTGXXC

SEQ ID NO: 8410 - protein, 15 aa, Artificial Sequence
  Synthetically generated peptide
  VARIANT (1)..(15): Xaa = Any Amino Acid
ACXEYCAXNPACTGC

SEQ ID NO: 8411 - protein, 16 aa, Artificial Sequence
  Synthetically generated peptide
  VARIANT (1)..(16): Xaa = Any Amino Acid
ACXEYCAXXNPACTGC

SEQ ID NO: 8412 - protein, 17 aa, Artificial Sequence
  Synthetically generated peptide
  VARIANT (1)..(17): Xaa = Any Amino Acid
ACXEYCAXXXNPACTGC

SEQ ID NO: 8413 - protein, 17 aa, Artificial Sequence
  Synthetically generated peptide
  VARIANT (1)..(17): Xaa = Any Amino Acid
ACXEYCAXXNXPACTGC

SEQ ID NO: 8414 - protein, 17 aa, Artificial Sequence
  Synthetically generated peptide
  VARIANT (1)..(17): Xaa = Any Amino Acid
ACXEYCAXXNPXACTGC

SEQ ID NO: 8415 - protein, 17 aa, Artificial Sequence
  Synthetically generated peptide
  VARIANT (1)..(17): Xaa = Any Amino Acid
ACXEYCAXXNPAXCTGC

SEQ ID NO: 8416 - protein, 17 aa, Artificial Sequence
  Synthetically generated peptide
  VARIANT (1)..(17): Xaa = Any Amino Acid
ACXEYCAXXNPACXTGC

SEQ ID NO: 8417 - protein, 17 aa, Artificial Sequence
  Synthetically generated peptide
  VARIANT (1)..(17): Xaa = Any Amino Acid
ACXEYCAXXNPACTXGC

SEQ ID NO: 8418 - protein, 17 aa, Artificial Sequence
  Synthetically generated peptide
  VARIANT (1)..(17): Xaa = Any Amino Acid
ACXEYCAXXNPACTGXC

SEQ ID NO: 8419 - protein, 16 aa, Artificial Sequence
  Synthetically generated peptide
  VARIANT (1)..(16): Xaa = Any Amino Acid
ACXEYCAXNXPACTGC

SEQ ID NO: 8420 - protein, 17 aa, Artificial Sequence
  Synthetically generated peptide
  VARIANT (1)..(17): Xaa = Any Amino Acid
ACXEYCAXNXXPACTGC

SEQ ID NO: 8421 - protein, 17 aa, Artificial Sequence
  Synthetically generated peptide
  VARIANT (1)..(17): Xaa = Any Amino Acid
ACXEYCAXNXPXACTGC

SEQ ID NO: 8422 - protein, 17 aa, Artificial Sequence
  Synthetically generated peptide
  VARIANT (1)..(17): Xaa = Any Amino Acid
ACXEYCAXNXPAXCTGC

SEQ ID NO: 8423 - protein, 17 aa, Artificial Sequence
  Synthetically generated peptide
  VARIANT (1)..(17): Xaa = Any Amino Acid
ACXEYCAXNXPACXTGC

SEQ ID NO: 8424 - protein, 17 aa, Artificial Sequence
  Synthetically generated peptide
  VARIANT (1)..(17): Xaa = Any Amino Acid
ACXEYCAXNXPACTXGC

SEQ ID NO: 8425 - protein, 17 aa, Artificial Sequence
  Synthetically generated peptide
  VARIANT (1)..(17): Xaa = Any Amino Acid
ACXEYCAXNXPACTGXC

SEQ ID NO: 8426 - protein, 16 aa, Artificial Sequence
  Synthetically generated peptide
  VARIANT (1)..(16): Xaa = Any Amino Acid
ACXEYCAXNPXACTGC

SEQ ID NO: 8427 - protein, 17 aa, Artificial Sequence
  Synthetically generated peptide
  VARIANT (1)..(17): Xaa = Any Amino Acid
ACXEYCAXNPXXACTGC

SEQ ID NO: 8428 - protein, 17 aa, Artificial Sequence
  Synthetically generated peptide
  VARIANT (1)..(17): Xaa = Any Amino Acid
ACXEYCAXNPXAXCTGC

SEQ ID NO: 8429 - protein, 17 aa, Artificial Sequence
  Synthetically generated peptide
  VARIANT (1)..(17): Xaa = Any Amino Acid
ACXEYCAXNPXACXTGC

SEQ ID NO: 8430 - protein, 17 aa, Artificial Sequence
  Synthetically generated peptide
  VARIANT (1)..(17): Xaa = Any Amino Acid
ACXEYCAXNPXACTXGC

SEQ ID NO: 8431 - protein, 17 aa, Artificial Sequence
  Synthetically generated peptide
  VARIANT (1)..(17): Xaa = Any Amino Acid
ACXEYCAXNPXACTGXC

SEQ ID NO: 8432 - protein, 16 aa, Artificial Sequence
  Synthetically generated peptide
  VARIANT (1)..(16): Xaa = Any Amino Acid
ACXEYCAXNPAXCTGC

SEQ ID NO: 8433 - protein, 17 aa, Artificial Sequence
  Synthetically generated peptide
  VARIANT (1)..(17): Xaa = Any Amino Acid
ACXEYCAXNPAXXCTGC

SEQ ID NO: 8434 - protein, 17 aa, Artificial Sequence
  Synthetically generated peptide
  VARIANT (1)..(17): Xaa = Any Amino Acid
ACXEYCAXNPAXCXTGC

SEQ ID NO: 8435 - protein, 17 aa, Artificial Sequence
  Synthetically generated peptide
  VARIANT (1)..(17): Xaa = Any Amino Acid
ACXEYCAXNPAXCTXGC

SEQ ID NO: 8436 - protein, 17 aa, Artificial Sequence
  Synthetically generated peptide
  VARIANT (1)..(17): Xaa = Any Amino Acid
ACXEYCAXNPAXCTGXC

SEQ ID NO: 8437 - protein, 16 aa, Artificial Sequence
  Synthetically generated peptide
  VARIANT (1)..(16): Xaa = Any Amino Acid
ACXEYCAXNPACXTGC

SEQ ID NO: 8438 - protein, 17 aa, Artificial Sequence
  Synthetically generated peptide
  VARIANT (1)..(17): Xaa = Any Amino Acid
ACXEYCAXNPACXXTGC

SEQ ID NO: 8439 - protein, 17 aa, Artificial Sequence
  Synthetically generated peptide
  VARIANT (1)..(17): Xaa = Any Amino Acid
ACXEYCAXNPACXTXGC

SEQ ID NO: 8440 - protein, 17 aa, Artificial Sequence
  Synthetically generated peptide
  VARIANT (1)..(17): Xaa = Any Amino Acid
ACXEYCAXNPACXTGXC

SEQ ID NO: 8441 - protein, 16 aa, Artificial Sequence
  Synthetically generated peptide
  VARIANT (1)..(16): Xaa = Any Amino Acid
ACXEYCAXNPACTXGC

SEQ ID NO: 8442 - protein, 17 aa, Artificial Sequence
  Synthetically generated peptide
  VARIANT (1)..(17): Xaa = Any Amino Acid
ACXEYCAXNPACTXXGC

SEQ ID NO: 8443 - protein, 17 aa, Artificial Sequence
  Synthetically generated peptide
  VARIANT (1)..(17): Xaa = Any Amino Acid
ACXEYCAXNPACTXGXC

SEQ ID NO: 8444 - protein, 16 aa, Artificial Sequence
  Synthetically generated peptide
  VARIANT (1)..(16): Xaa = Any Amino Acid
ACXEYCAXNPACTGXC

SEQ ID NO: 8445 - protein, 17 aa, Artificial Sequence
  Synthetically generated peptide
  VARIANT (1)..(17): Xaa = Any Amino Acid
ACXEYCAXNPACTGXXC

SEQ ID NO: 8446 - protein, 15 aa, Artificial Sequence
  Synthetically generated peptide
  VARIANT (1)..(15): Xaa = Any Amino Acid
ACXEYCANXPACTGC

SEQ ID NO: 8447 - protein, 16 aa, Artificial Sequence
  Synthetically generated peptide
  VARIANT (1)..(16): Xaa = Any Amino Acid
ACXEYCANXXPACTGC

SEQ ID NO: 8448 - protein, 17 aa, Artificial Sequence
  Synthetically generated peptide
  VARIANT (1)..(17): Xaa = Any Amino Acid
ACXEYCANXXXPACTGC

SEQ ID NO: 8449 - protein, 17 aa, Artificial Sequence
  Synthetically generated peptide
  VARIANT (1)..(17): Xaa = Any Amino Acid
ACXEYCANXXPXACTGC

SEQ ID NO: 8450 - protein, 17 aa, Artificial Sequence
  Synthetically generated peptide
  VARIANT (1)..(17): Xaa = Any Amino Acid
ACXEYCANXXPAXCTGC

SEQ ID NO: 8451 - protein, 17 aa, Artificial Sequence
  Synthetically generated peptide
  VARIANT (1)..(17): Xaa = Any Amino Acid
ACXEYCANXXPACXTGC

SEQ ID NO: 8452 - protein, 17 aa, Artificial Sequence
  Synthetically generated peptide
  VARIANT (1)..(17): Xaa = Any Amino Acid
ACXEYCANXXPACTXGC

SEQ ID NO: 8453 - protein, 17 aa, Artificial Sequence
  Synthetically generated peptide
  VARIANT (1)..(17): Xaa = Any Amino Acid
ACXEYCANXXPACTGXC

SEQ ID NO: 8454 - protein, 16 aa, Artificial Sequence
  Synthetically generated peptide
  VARIANT (1)..(16): Xaa = Any Amino Acid
ACXEYCANXPXACTGC

SEQ ID NO: 8455 - protein, 17 aa, Artificial Sequence
  Synthetically generated peptide
  VARIANT (1)..(17): Xaa = Any Amino Acid
ACXEYCANXPXXACTGC

SEQ ID NO: 8456 - protein, 17 aa, Artificial Sequence
  Synthetically generated peptide
  VARIANT (1)..(17): Xaa = Any Amino Acid
ACXEYCANXPXAXCTGC

SEQ ID NO: 8457 - protein, 17 aa, Artificial Sequence
  Synthetically generated peptide
  VARIANT (1)..(17): Xaa = Any Amino Acid
ACXEYCANXPXACXTGC

SEQ ID NO: 8458 - protein, 17 aa, Artificial Sequence
  Synthetically generated peptide
  VARIANT (1)..(17): Xaa = Any Amino Acid
ACXEYCANXPXACTXGC

SEQ ID NO: 8459 - protein, 17 aa, Artificial Sequence
  Synthetically generated peptide
  VARIANT (1)..(17): Xaa = Any Amino Acid
ACXEYCANXPXACTGXC

SEQ ID NO: 8460 - protein, 16 aa, Artificial Sequence
  Synthetically generated peptide
  VARIANT (1)..(16): Xaa = Any Amino Acid
ACXEYCANXPAXCTGC

SEQ ID NO: 8461 - protein, 17 aa, Artificial Sequence
  Synthetically generated peptide
  VARIANT (1)..(17): Xaa = Any Amino Acid
ACXEYCANXPAXXCTGC

SEQ ID NO: 8462 - protein, 17 aa, Artificial Sequence
  Synthetically generated peptide
  VARIANT (1)..(17): Xaa = Any Amino Acid
ACXEYCANXPAXCXTGC

SEQ ID NO: 8463 - protein, 17 aa, Artificial Sequence
  Synthetically generated peptide
  VARIANT (1)..(17): Xaa = Any Amino Acid
ACXEYCANXPAXCTXGC

SEQ ID NO: 8464 - protein, 17 aa, Artificial Sequence
  Synthetically generated peptide
  VARIANT (1)..(17): Xaa = Any Amino Acid
ACXEYCANXPAXCTGXC

SEQ ID NO: 8465 - protein, 16 aa, Artificial Sequence
  Synthetically generated peptide
  VARIANT (1)..(16): Xaa = Any Amino Acid
ACXEYCANXPACXTGC

SEQ ID NO: 8466 - protein, 17 aa, Artificial Sequence
  Synthetically generated peptide
  VARIANT (1)..(17): Xaa = Any Amino Acid
ACXEYCANXPACXXTGC

SEQ ID NO: 8467 - protein, 17 aa, Artificial Sequence
  Synthetically generated peptide
  VARIANT (1)..(17): Xaa = Any Amino Acid
ACXEYCANXPACXTXGC

SEQ ID NO: 8468 - protein, 17 aa, Artificial Sequence
  Synthetically generated peptide
  VARIANT (1)..(17): Xaa = Any Amino Acid
ACXEYCANXPACXTGXC

SEQ ID NO: 8469 - protein, 16 aa, Artificial Sequence
  Synthetically generated peptide
  VARIANT (1)..(16): Xaa = Any Amino Acid
ACXEYCANXPACTXGC

SEQ ID NO: 8470 - protein, 17 aa, Artificial Sequence
  Synthetically generated peptide
  VARIANT (1)..(17): Xaa = Any Amino Acid
ACXEYCANXPACTXXGC

SEQ ID NO: 8471 - protein, 17 aa, Artificial Sequence
  Synthetically generated peptide
  VARIANT (1)..(17): Xaa = Any Amino Acid
ACXEYCANXPACTXGXC

SEQ ID NO: 8472 - protein, 16 aa, Artificial Sequence
  Synthetically generated peptide
  VARIANT (1)..(16): Xaa = Any Amino Acid
ACXEYCANXPACTGXC

SEQ ID NO: 8473 - protein, 17 aa, Artificial Sequence
  Synthetically generated peptide
  VARIANT (1)..(17): Xaa = Any Amino Acid
ACXEYCANXPACTGXXC

SEQ ID NO: 8474 - protein, 15 aa, Artificial Sequence
  Synthetically generated peptide
  VARIANT (1)..(15): Xaa = Any Amino Acid
ACXEYCANPXACTGC

SEQ ID NO: 8475 - protein, 16 aa, Artificial Sequence
  Synthetically generated peptide
  VARIANT (1)..(16): Xaa = Any Amino Acid
ACXEYCANPXXACTGC

SEQ ID NO: 8476 - protein, 17 aa, Artificial Sequence
  Synthetically generated peptide
  VARIANT (1)..(17): Xaa = Any Amino Acid
ACXEYCANPXXXACTGC

SEQ ID NO: 8477 - protein, 17 aa, Artificial Sequence
  Synthetically generated peptide
  VARIANT (1)..(17): Xaa = Any Amino Acid
ACXEYCANPXXAXCTGC

SEQ ID NO: 8478 - protein, 17 aa, Artificial Sequence
  Synthetically generated peptide
  VARIANT (1)..(17): Xaa = Any Amino Acid
ACXEYCANPXXACXTGC

SEQ ID NO: 8479 - protein, 17 aa, Artificial Sequence
  Synthetically generated peptide
  VARIANT (1)..(17): Xaa = Any Amino Acid
ACXEYCANPXXACTXGC

SEQ ID NO: 8480 - protein, 17 aa, Artificial Sequence
  Synthetically generated peptide
  VARIANT (1)..(17): Xaa = Any Amino Acid
ACXEYCANPXXACTGXC

SEQ ID NO: 8481 - protein, 16 aa, Artificial Sequence
  Synthetically generated peptide
  VARIANT (1)..(16): Xaa = Any Amino Acid
ACXEYCANPXAXCTGC

SEQ ID NO: 8482 - protein, 17 aa, Artificial Sequence
  Synthetically generated peptide
  VARIANT (1)..(17): Xaa = Any Amino Acid
ACXEYCANPXAXXCTGC

SEQ ID NO: 8483 - protein, 17 aa, Artificial Sequence
  Synthetically generated peptide
  VARIANT (1)..(17): Xaa = Any Amino Acid
ACXEYCANPXAXCXTGC

SEQ ID NO: 8484 - protein, 17 aa, Artificial Sequence
  Synthetically generated peptide
  VARIANT (1)..(17): Xaa = Any Amino Acid
ACXEYCANPXAXCTXGC

SEQ ID NO: 8485 - protein, 17 aa, Artificial Sequence
  Synthetically generated peptide
  VARIANT (1)..(17): Xaa = Any Amino Acid
ACXEYCANPXAXCTGXC

SEQ ID NO: 8486 - protein, 16 aa, Artificial Sequence
  Synthetically generated peptide
  VARIANT (1)..(16): Xaa = Any Amino Acid
ACXEYCANPXACXTGC

SEQ ID NO: 8487 - protein, 17 aa, Artificial Sequence
  Synthetically generated peptide
  VARIANT (1)..(17): Xaa = Any Amino Acid
ACXEYCANPXACXXTGC

SEQ ID NO: 8488 - protein, 17 aa, Artificial Sequence
  Synthetically generated peptide
  VARIANT (1)..(17): Xaa = Any Amino Acid
ACXEYCANPXACXTXGC

SEQ ID NO: 8489 - protein, 17 aa, Artificial Sequence
  Synthetically generated peptide
  VARIANT (1)..(17): Xaa = Any Amino Acid
ACXEYCANPXACXTGXC

SEQ ID NO: 8490 - protein, 16 aa, Artificial Sequence
  Synthetically generated peptide
  VARIANT (1)..(16): Xaa = Any Amino Acid
ACXEYCANPXACTXGC

SEQ ID NO: 8491 - protein, 17 aa, Artificial Sequence
  Synthetically generated peptide
  VARIANT (1)..(17): Xaa = Any Amino Acid
ACXEYCANPXACTXXGC

SEQ ID NO: 8492 - protein, 17 aa, Artificial Sequence
  Synthetically generated peptide
  VARIANT (1)..(17): Xaa = Any Amino Acid
ACXEYCANPXACTXGXC

SEQ ID NO: 8493 - protein, 16 aa, Artificial Sequence
  Synthetically generated peptide
  VARIANT (1)..(16): Xaa = Any Amino Acid
ACXEYCANPXACTGXC

SEQ ID NO: 8494 - protein, 17 aa, Artificial Sequence
  Synthetically generated peptide
  VARIANT (1)..(17): Xaa = Any Amino Acid
ACXEYCANPXACTGXXC

SEQ ID NO: 8495 - protein, 15 aa, Artificial Sequence
  Synthetically generated peptide
  VARIANT (1)..(15): Xaa = Any Amino Acid
ACXEYCANPAXCTGC

SEQ ID NO: 8496 - protein, 16 aa, Artificial Sequence
  Synthetically generated peptide
  VARIANT (1)..(16): Xaa = Any Amino Acid
ACXEYCANPAXXCTGC

SEQ ID NO: 8497 - protein, 17 aa, Artificial Sequence
  Synthetically generated peptide
  VARIANT (1)..(17): Xaa = Any Amino Acid
ACXEYCANPAXXXCTGC

SEQ ID NO: 8498 - protein, 17 aa, Artificial Sequence
  Synthetically generated peptide
  VARIANT (1)..(17): Xaa = Any Amino Acid
ACXEYCANPAXXCXTGC

SEQ ID NO: 8499 - protein, 17 aa, Artificial Sequence
  Synthetically generated peptide
  VARIANT (1)..(17): Xaa = Any Amino Acid
ACXEYCANPAXXCTXGC

SEQ ID NO: 8500 - protein, 17 aa, Artificial Sequence
  Synthetically generated peptide
  VARIANT (1)..(17): Xaa = Any Amino Acid
ACXEYCANPAXXCTGXC

SEQ ID NO: 8501 - protein, 16 aa, Artificial Sequence
  Synthetically generated peptide
  VARIANT (1)..(16): Xaa = Any Amino Acid
ACXEYCANPAXCXTGC

SEQ ID NO: 8502 - protein, 17 aa, Artificial Sequence
  Synthetically generated peptide
  VARIANT (1)..(17): Xaa = Any Amino Acid
ACXEYCANPAXCXXTGC

SEQ ID NO: 8503 - protein, 17 aa, Artificial Sequence
  Synthetically generated peptide
  VARIANT (1)..(17): Xaa = Any Amino Acid
ACXEYCANPAXCXTXGC

SEQ ID NO: 8504 - protein, 17 aa, Artificial Sequence
  Synthetically generated peptide
  VARIANT (1)..(17): Xaa = Any Amino Acid
ACXEYCANPAXCXTGXC

SEQ ID NO: 8505 - protein, 16 aa, Artificial Sequence
  Synthetically generated peptide
  VARIANT (1)..(16): Xaa = Any Amino Acid
ACXEYCANPAXCTXGC

SEQ ID NO: 8506 - protein, 17 aa, Artificial Sequence
  Synthetically generated peptide
  VARIANT (1)..(17): Xaa = Any Amino Acid
ACXEYCANPAXCTXXGC

SEQ ID NO: 8507 - protein, 17 aa, Artificial Sequence
  Synthetically generated peptide
  VARIANT (1)..(17): Xaa = Any Amino Acid
ACXEYCANPAXCTXGXC

SEQ ID NO: 8508 - protein, 16 aa, Artificial Sequence
  Synthetically generated peptide
  VARIANT (1)..(16): Xaa = Any Amino Acid
ACXEYCANPAXCTGXC

SEQ ID NO: 8509 - protein, 17 aa, Artificial Sequence
  Synthetically generated peptide
  VARIANT (1)..(17): Xaa = Any Amino Acid
ACXEYCANPAXCTGXXC

SEQ ID NO: 8510 - protein, 15 aa, Artificial Sequence
  Synthetically generated peptide
  VARIANT (1)..(15): Xaa = Any Amino Acid
ACXEYCANPACXTGC

SEQ ID NO: 8511 - protein, 16 aa, Artificial Sequence
  Synthetically generated peptide
  VARIANT (1)..(16): Xaa = Any Amino Acid
ACXEYCANPACXXTGC

SEQ ID NO: 8512 - protein, 17 aa, Artificial Sequence
  Synthetically generated peptide
  VARIANT (1)..(17): Xaa = Any Amino Acid
ACXEYCANPACXXXTGC

SEQ ID NO: 8513 - protein, 17 aa, Artificial Sequence
  Synthetically generated peptide
  VARIANT (1)..(17): Xaa = Any Amino Acid
ACXEYCANPACXXTXGC

SEQ ID NO: 8514 - protein, 17 aa, Artificial Sequence
  Synthetically generated peptide
  VARIANT (1)..(17): Xaa = Any Amino Acid
ACXEYCANPACXXTGXC

SEQ ID NO: 8515 - protein, 16 aa, Artificial Sequence
  Synthetically generated peptide
  VARIANT (1)..(16): Xaa = Any Amino Acid
ACXEYCANPACXTXGC

SEQ ID NO: 8516 - protein, 17 aa, Artificial Sequence
  Synthetically generated peptide
  VARIANT (1)..(17): Xaa = Any Amino Acid
ACXEYCANPACXTXXGC

SEQ ID NO: 8517 - protein, 17 aa, Artificial Sequence
  Synthetically generated peptide
  VARIANT (1)..(17): Xaa = Any Amino Acid
ACXEYCANPACXTXGXC

SEQ ID NO: 8518 - protein, 16 aa, Artificial Sequence
  Synthetically generated peptide
  VARIANT (1)..(16): Xaa = Any Amino Acid
ACXEYCANPACXTGXC

SEQ ID NO: 8519 - protein, 17 aa, Artificial Sequence
  Synthetically generated peptide
  VARIANT (1)..(17): Xaa = Any Amino Acid
ACXEYCANPACXTGXXC

SEQ ID NO: 8520 - protein, 15 aa, Artificial Sequence
  Synthetically generated peptide
  VARIANT (1)..(15): Xaa = Any Amino Acid
ACXEYCANPACTXGC

SEQ ID NO: 8521 - protein, 16 aa, Artificial Sequence
  Synthetically generated peptide
  VARIANT (1)..(16): Xaa = Any Amino Acid
ACXEYCANPACTXXGC

SEQ ID NO: 8522 - protein, 17 aa, Artificial Sequence
  Synthetically generated peptide
  VARIANT (1)..(17): Xaa = Any Amino Acid
ACXEYCANPACTXXXGC

SEQ ID NO: 8523 - protein, 17 aa, Artificial Sequence
  Synthetically generated peptide
  VARIANT (1)..(17): Xaa = Any Amino Acid
ACXEYCANPACTXXGXC

SEQ ID NO: 8524 - protein, 16 aa, Artificial Sequence
  Synthetically generated peptide
  VARIANT (1)..(16): Xaa = Any Amino Acid
ACXEYCANPACTXGXC

SEQ ID NO: 8525 - protein, 17 aa, Artificial Sequence
  Synthetically generated peptide
  VARIANT (1)..(17): Xaa = Any Amino Acid
ACXEYCANPACTXGXXC

SEQ ID NO: 8526 - protein, 15 aa, Artificial Sequence
  Synthetically generated peptide
  VARIANT (1)..(15): Xaa = Any Amino Acid
ACXEYCANPACTGXC

SEQ ID NO: 8527 - protein, 16 aa, Artificial Sequence
  Synthetically generated peptide
  VARIANT (1)..(16): Xaa = Any Amino Acid
ACXEYCANPACTGXXC

SEQ ID NO: 8528 - protein, 17 aa, Artificial Sequence
  Synthetically generated peptide
  VARIANT (1)..(17): Xaa = Any Amino Acid
ACXEYCANPACTGXXXC

SEQ ID NO: 8529 - protein, 14 aa, Artificial Sequence
  Synthetically generated peptide
  VARIANT (1)..(14): Xaa = Any Amino Acid
ACEXYCANPACTGC

SEQ ID NO: 8530 - protein, 15 aa, Artificial Sequence
  Synthetically generated peptide
  VARIANT (1)..(15): Xaa = Any Amino Acid
ACEXXYCANPACTGC

SEQ ID NO: 8531 - protein, 16 aa, Artificial Sequence
  Synthetically generated peptide
  VARIANT (1)..(16): Xaa = Any Amino Acid
ACEXXXYCANPACTGC

SEQ ID NO: 8532 - protein, 17 aa, Artificial Sequence
  Synthetically generated peptide
  VARIANT (1)..(17): Xaa = Any Amino Acid
ACEXXXXYCANPACTGC

SEQ ID NO: 8533 - protein, 17 aa, Artificial Sequence
  Synthetically generated peptide
  VARIANT (1)..(17): Xaa = Any Amino Acid
ACEXXXYXCANPACTGC

SEQ ID NO: 8534 - protein, 17 aa, Artificial Sequence
  Synthetically generated peptide
  VARIANT (1)..(17): Xaa = Any Amino Acid
ACEXXXYCAXNPACTGC

SEQ ID NO: 8535 - protein, 17 aa, Artificial Sequence
  Synthetically generated peptide
  VARIANT (1)..(17): Xaa = Any Amino Acid
ACEXXXYCANXPACTGC

SEQ ID NO: 8536 - protein, 17 aa, Artificial Sequence
  Synthetically generated peptide
  VARIANT (1)..(17): Xaa = Any Amino Acid
ACEXXXYCANPXACTGC

SEQ ID NO: 8537 - protein, 17 aa, Artificial Sequence
  Synthetically generated peptide
  VARIANT (1)..(17): Xaa = Any Amino Acid
ACEXXXYCANPAXCTGC

SEQ ID NO: 8538 - protein, 17 aa, Artificial Sequence
  Synthetically generated peptide
  VARIANT (1)..(17): Xaa = Any Amino Acid
ACEXXXYCANPACXTGC

SEQ ID NO: 8539 - protein, 17 aa, Artificial Sequence
  Synthetically generated peptide
  VARIANT (1)..(17): Xaa = Any Amino Acid
ACEXXXYCANPACTXGC

SEQ ID NO: 8540 - protein, 17 aa, Artificial Sequence
  Synthetically generated peptide
  VARIANT (1)..(17): Xaa = Any Amino Acid
ACEXXXYCANPACTGXC

SEQ ID NO: 8541 - protein, 16 aa, Artificial Sequence
  Synthetically generated peptide
  VARIANT (1)..(16): Xaa = Any Amino Acid
ACEXXYXCANPACTGC

SEQ ID NO: 8542 - protein, 17 aa, Artificial Sequence
  Synthetically generated peptide
  VARIANT (1)..(17): Xaa = Any Amino Acid
ACEXXYXXCANPACTGC

SEQ ID NO: 8543 - protein, 17 aa, Artificial Sequence
  Synthetically generated peptide
  VARIANT (1)..(17): Xaa = Any Amino Acid
ACEXXYXCAXNPACTGC

SEQ ID NO: 8544 - protein, 17 aa, Artificial Sequence
  Synthetically generated peptide
  VARIANT (1)..(17): Xaa = Any Amino Acid
ACEXXYXCANXPACTGC

SEQ ID NO: 8545 - protein, 17 aa, Artificial Sequence
  Synthetically generated peptide
  VARIANT (1)..(17): Xaa = Any Amino Acid
ACEXXYXCANPXACTGC

SEQ ID NO: 8546 - protein, 17 aa, Artificial Sequence
  Synthetically generated peptide
  VARIANT (1)..(17): Xaa = Any Amino Acid
ACEXXYXCANPAXCTGC

SEQ ID NO: 8547 - protein, 17 aa, Artificial Sequence
  Synthetically generated peptide
  VARIANT (1)..(17): Xaa = Any Amino Acid
ACEXXYXCANPACXTGC

SEQ ID NO: 8548 - protein, 17 aa, Artificial Sequence
  Synthetically generated peptide
  VARIANT (1)..(17): Xaa = Any Amino Acid
ACEXXYXCANPACTXGC

SEQ ID NO: 8549 - protein, 17 aa, Artificial Sequence
  Synthetically generated peptide
  VARIANT (1)..(17): Xaa = Any Amino Acid
ACEXXYXCANPACTGXC

SEQ ID NO: 8550 - protein, 16 aa, Artificial Sequence
  Synthetically generated peptide
  VARIANT (1)..(16): Xaa = Any Amino Acid
ACEXXYCAXNPACTGC

SEQ ID NO: 8551 - protein, 17 aa, Artificial Sequence
  Synthetically generated peptide
  VARIANT (1)..(17): Xaa = Any Amino Acid
ACEXXYCAXXNPACTGC

SEQ ID NO: 8552 - protein, 17 aa, Artificial Sequence
  Synthetically generated peptide
  VARIANT (1)..(17): Xaa = Any Amino Acid
ACEXXYCAXNXPACTGC

SEQ ID NO: 8553 - protein, 17 aa, Artificial Sequence
  Synthetically generated peptide
  VARIANT (1)..(17): Xaa = Any Amino Acid
ACEXXYCAXNPXACTGC

SEQ ID NO: 8554 - protein, 17 aa, Artificial Sequence
  Synthetically generated peptide
  VARIANT (1)..(17): Xaa = Any Amino Acid
ACEXXYCAXNPAXCTGC

SEQ ID NO: 8555 - protein, 17 aa, Artificial Sequence
  Synthetically generated peptide
  VARIANT (1)..(17): Xaa = Any Amino Acid
ACEXXYCAXNPACXTGC

SEQ ID NO: 8556 - protein, 17 aa, Artificial Sequence
  Synthetically generated peptide
  VARIANT (1)..(17): Xaa = Any Amino Acid
ACEXXYCAXNPACTXGC

SEQ ID NO: 8557 - protein, 17 aa, Artificial Sequence
  Synthetically generated peptide
  VARIANT (1)..(17): Xaa = Any Amino Acid
ACEXXYCAXNPACTGXC

SEQ ID NO: 8558 - protein, 16 aa, Artificial Sequence
  Synthetically generated peptide
  VARIANT (1)..(16): Xaa = Any Amino Acid
ACEXXYCANXPACTGC

SEQ ID NO: 8559 - protein, 17 aa, Artificial Sequence
  Synthetically generated peptide
  VARIANT (1)..(17): Xaa = Any Amino Acid
ACEXXYCANXXPACTGC

SEQ ID NO: 8560 - protein, 17 aa, Artificial Sequence
  Synthetically generated peptide
  VARIANT (1)..(17): Xaa = Any Amino Acid
ACEXXYCANXPXACTGC

SEQ ID NO: 8561 - protein, 17 aa, Artificial Sequence
  Synthetically generated peptide
  VARIANT (1)..(17): Xaa = Any Amino Acid
ACEXXYCANXPAXCTGC

SEQ ID NO: 8562 - protein, 17 aa, Artificial Sequence
  Synthetically generated peptide
  VARIANT (1)..(17): Xaa = Any Amino Acid
ACEXXYCANXPACXTGC

SEQ ID NO: 8563 - protein, 17 aa, Artificial Sequence
  Synthetically generated peptide
  VARIANT (1)..(17): Xaa = Any Amino Acid
ACEXXYCANXPACTXGC

SEQ ID NO: 8564 - protein, 17 aa, Artificial Sequence
  Synthetically generated peptide
  VARIANT (1)..(17): Xaa = Any Amino Acid
ACEXXYCANXPACTGXC

SEQ ID NO: 8565 - protein, 16 aa, Artificial Sequence
  Synthetically generated peptide
  VARIANT (1)..(16): Xaa = Any Amino Acid
ACEXXYCANPXACTGC

SEQ ID NO: 8566 - protein, 17 aa, Artificial Sequence
  Synthetically generated peptide
  VARIANT (1)..(17): Xaa = Any Amino Acid
ACEXXYCANPXXACTGC

SEQ ID NO: 8567 - protein, 17 aa, Artificial Sequence
  Synthetically generated peptide
  VARIANT (1)..(17): Xaa = Any Amino Acid
ACEXXYCANPXAXCTGC

SEQ ID NO: 8568 - protein, 17 aa, Artificial Sequence
  Synthetically generated peptide
  VARIANT (1)..(17): Xaa = Any Amino Acid
ACEXXYCANPXACXTGC

SEQ ID NO: 8569 - protein, 17 aa, Artificial Sequence
  Synthetically generated peptide
  VARIANT (1)..(17): Xaa = Any Amino Acid
ACEXXYCANPXACTXGC

SEQ ID NO: 8570 - protein, 17 aa, Artificial Sequence
  Synthetically generated peptide
  VARIANT (1)..(17): Xaa = Any Amino Acid
ACEXXYCANPXACTGXC

SEQ ID NO: 8571 - protein, 16 aa, Artificial Sequence
  Synthetically generated peptide
  VARIANT (1)..(16): Xaa = Any Amino Acid
ACEXXYCANPAXCTGC

SEQ ID NO: 8572 - protein, 17 aa, Artificial Sequence
  Synthetically generated peptide
  VARIANT (1)..(17): Xaa = Any Amino Acid
ACEXXYCANPAXXCTGC

SEQ ID NO: 8573 - protein, 17 aa, Artificial Sequence
  Synthetically generated peptide
  VARIANT (1)..(17): Xaa = Any Amino Acid
ACEXXYCANPAXCXTGC

SEQ ID NO: 8574 - protein, 17 aa, Artificial Sequence
  Synthetically generated peptide
  VARIANT (1)..(17): Xaa = Any Amino Acid
ACEXXYCANPAXCTXGC

SEQ ID NO: 8575 - protein, 17 aa, Artificial Sequence
  Synthetically generated peptide
  VARIANT (1)..(17): Xaa = Any Amino Acid
ACEXXYCANPAXCTGXC

SEQ ID NO: 8576 - protein, 16 aa, Artificial Sequence
  Synthetically generated peptide
  VARIANT (1)..(16): Xaa = Any Amino Acid
ACEXXYCANPACXTGC

SEQ ID NO: 8577 - protein, 17 aa, Artificial Sequence
  Synthetically generated peptide
  VARIANT (1)..(17): Xaa = Any Amino Acid
ACEXXYCANPACXXTGC

SEQ ID NO: 8578 - protein, 17 aa, Artificial Sequence
  Synthetically generated peptide
  VARIANT (1)..(17): Xaa = Any Amino Acid
ACEXXYCANPACXTXGC

SEQ ID NO: 8579 - protein, 17 aa, Artificial Sequence
  Synthetically generated peptide
  VARIANT (1)..(17): Xaa = Any Amino Acid
ACEXXYCANPACXTGXC

SEQ ID NO: 8580 - protein, 16 aa, Artificial Sequence
  Synthetically generated peptide
  VARIANT (1)..(16): Xaa = Any Amino Acid
ACEXXYCANPACTXGC

SEQ ID NO: 8581 - protein, 17 aa, Artificial Sequence
  Synthetically generated peptide
  VARIANT (1)..(17): Xaa = Any Amino Acid
ACEXXYCANPACTXXGC

SEQ ID NO: 8582 - protein, 17 aa, Artificial Sequence
  Synthetically generated peptide
  VARIANT (1)..(17): Xaa = Any Amino Acid
ACEXXYCANPACTXGXC

SEQ ID NO: 8583 - protein, 16 aa, Artificial Sequence
  Synthetically generated peptide
  VARIANT (1)..(16): Xaa = Any Amino Acid
ACEXXYCANPACTGXC

SEQ ID NO: 8584 - protein, 17 aa, Artificial Sequence
  Synthetically generated peptide
  VARIANT (1)..(17): Xaa = Any Amino Acid
ACEXXYCANPACTGXXC

SEQ ID NO: 8585 - protein, 15 aa, Artificial Sequence
  Synthetically generated peptide
  VARIANT (1)..(15): Xaa = Any Amino Acid
ACEXYXCANPACTGC

SEQ ID NO: 8586 - protein, 16 aa, Artificial Sequence
  Synthetically generated peptide
  VARIANT (1)..(16): Xaa = Any Amino Acid
ACEXYXXCANPACTGC

SEQ ID NO: 8587 - protein, 17 aa, Artificial Sequence
  Synthetically generated peptide
  VARIANT (1)..(17): Xaa = Any Amino Acid
ACEXYXXXCANPACTGC

SEQ ID NO: 8588 - protein, 17 aa, Artificial Sequence
  Synthetically generated peptide
  VARIANT (1)..(17): Xaa = Any Amino Acid
ACEXYXXCAXNPACTGC

SEQ ID NO: 8589 - protein, 17 aa, Artificial Sequence
  Synthetically generated peptide
  VARIANT (1)..(17): Xaa = Any Amino Acid
ACEXYXXCANXPACTGC

SEQ ID NO: 8590 - protein, 17 aa, Artificial Sequence
  Synthetically generated peptide
  VARIANT (1)..(17): Xaa = Any Amino Acid
ACEXYXXCANPXACTGC

SEQ ID NO: 8591 - protein, 17 aa, Artificial Sequence
  Synthetically generated peptide
  VARIANT (1)..(17): Xaa = Any Amino Acid
ACEXYXXCANPAXCTGC

SEQ ID NO: 8592 - protein, 17 aa, Artificial Sequence
  Synthetically generated peptide
  VARIANT (1)..(17): Xaa = Any Amino Acid
ACEXYXXCANPACXTGC

SEQ ID NO: 8593 - protein, 17 aa, Artificial Sequence
  Synthetically generated peptide
  VARIANT (1)..(17): Xaa = Any Amino Acid
ACEXYXXCANPACTXGC

SEQ ID NO: 8594 - protein, 17 aa, Artificial Sequence
  Synthetically generated peptide
  VARIANT (1)..(17): Xaa = Any Amino Acid
ACEXYXXCANPACTGXC

SEQ ID NO: 8595 - protein, 16 aa, Artificial Sequence
  Synthetically generated peptide
  VARIANT (1)..(16): Xaa = Any Amino Acid
ACEXYXCAXNPACTGC

SEQ ID NO: 8596 - protein, 17 aa, Artificial Sequence
  Synthetically generated peptide
  VARIANT (1)..(17): Xaa = Any Amino Acid
ACEXYXCAXXNPACTGC

SEQ ID NO: 8597 - protein, 17 aa, Artificial Sequence
  Synthetically generated peptide
  VARIANT (1)..(17): Xaa = Any Amino Acid
ACEXYXCAXNXPACTGC

SEQ ID NO: 8598 - protein, 17 aa, Artificial Sequence
  Synthetically generated peptide
  VARIANT (1)..(17): Xaa = Any Amino Acid
ACEXYXCAXNPXACTGC

SEQ ID NO: 8599 - protein, 17 aa, Artificial Sequence
  Synthetically generated peptide
  VARIANT (1)..(17): Xaa = Any Amino Acid
ACEXYXCAXNPAXCTGC

SEQ ID NO: 8600 - protein, 17 aa, Artificial Sequence
  Synthetically generated peptide
  VARIANT (1)..(17): Xaa = Any Amino Acid
ACEXYXCAXNPACXTGC

SEQ ID NO: 8601 - protein, 17 aa, Artificial Sequence
  Synthetically generated peptide
  VARIANT (1)..(17): Xaa = Any Amino Acid
ACEXYXCAXNPACTXGC

SEQ ID NO: 8602 - protein, 17 aa, Artificial Sequence
  Synthetically generated peptide
  VARIANT (1)..(17): Xaa = Any Amino Acid
ACEXYXCAXNPACTGXC

SEQ ID NO: 8603 - protein, 16 aa, Artificial Sequence
  Synthetically generated peptide
  VARIANT (1)..(16): Xaa = Any Amino Acid
ACEXYXCANXPACTGC

SEQ ID NO: 8604 - protein, 17 aa, Artificial Sequence
  Synthetically generated peptide
  VARIANT (1)..(17): Xaa = Any Amino Acid
ACEXYXCANXXPACTGC

SEQ ID NO: 8605 - protein, 17 aa, Artificial Sequence
  Synthetically generated peptide
  VARIANT (1)..(17): Xaa = Any Amino Acid
ACEXYXCANXPXACTGC

SEQ ID NO: 8606 - protein, 17 aa, Artificial Sequence
  Synthetically generated peptide
  VARIANT (1)..(17): Xaa = Any Amino Acid
ACEXYXCANXPAXCTGC

SEQ ID NO: 8607 - protein, 17 aa, Artificial Sequence
  Synthetically generated peptide
  VARIANT (1)..(17): Xaa = Any Amino Acid
ACEXYXCANXPACXTGC

SEQ ID NO: 8608 - protein, 17 aa, Artificial Sequence
  Synthetically generated peptide
  VARIANT (1)..(17): Xaa = Any Amino Acid
ACEXYXCANXPACTXGC

SEQ ID NO: 8609 - protein, 17 aa, Artificial Sequence
  Synthetically generated peptide
  VARIANT (1)..(17): Xaa = Any Amino Acid
ACEXYXCANXPACTGXC

SEQ ID NO: 8610 - protein, 16 aa, Artificial Sequence
  Synthetically generated peptide
  VARIANT (1)..(16): Xaa = Any Amino Acid
ACEXYXCANPXACTGC

SEQ ID NO: 8611 - protein, 17 aa, Artificial Sequence
  Synthetically generated peptide
  VARIANT (1)..(17): Xaa = Any Amino Acid
ACEXYXCANPXXACTGC

SEQ ID NO: 8612 - protein, 17 aa, Artificial Sequence
  Synthetically generated peptide
  VARIANT (1)..(17): Xaa = Any Amino Acid
ACEXYXCANPXAXCTGC

SEQ ID NO: 8613 - protein, 17 aa, Artificial Sequence
  Synthetically generated peptide
  VARIANT (1)..(17): Xaa = Any Amino Acid
ACEXYXCANPXACXTGC

SEQ ID NO: 8614 - protein, 17 aa, Artificial Sequence
  Synthetically generated peptide
  VARIANT (1)..(17): Xaa = Any Amino Acid
ACEXYXCANPXACTXGC

SEQ ID NO: 8615 - protein, 17 aa, Artificial Sequence
  Synthetically generated peptide
  VARIANT (1)..(17): Xaa = Any Amino Acid
ACEXYXCANPXACTGXC

SEQ ID NO: 8616 - protein, 16 aa, Artificial Sequence
  Synthetically generated peptide
  VARIANT (1)..(16): Xaa = Any Amino Acid
ACEXYXCANPAXCTGC

SEQ ID NO: 8617 - protein, 17 aa, Artificial Sequence
  Synthetically generated peptide
  VARIANT (1)..(17): Xaa = Any Amino Acid
ACEXYXCANPAXXCTGC

SEQ ID NO: 8618 - protein, 17 aa, Artificial Sequence
  Synthetically generated peptide
  VARIANT (1)..(17): Xaa = Any Amino Acid
ACEXYXCANPAXCXTGC

SEQ ID NO: 8619 - protein, 17 aa, Artificial Sequence
  Synthetically generated peptide
  VARIANT (1)..(17): Xaa = Any Amino Acid
ACEXYXCANPAXCTXGC

SEQ ID NO: 8620 - protein, 17 aa, Artificial Sequence
  Synthetically generated peptide
  VARIANT (1)..(17): Xaa = Any Amino Acid
ACEXYXCANPAXCTGXC

SEQ ID NO: 8621 - protein, 16 aa, Artificial Sequence
  Synthetically generated peptide
  VARIANT (1)..(16): Xaa = Any Amino Acid
ACEXYXCANPACXTGC

SEQ ID NO: 8622 - protein, 17 aa, Artificial Sequence
  Synthetically generated peptide
  VARIANT (1)..(17): Xaa = Any Amino Acid
ACEXYXCANPACXXTGC

SEQ ID NO: 8623 - protein, 17 aa, Artificial Sequence
  Synthetically generated peptide
  VARIANT (1)..(17): Xaa = Any Amino Acid
ACEXYXCANPACXTXGC

SEQ ID NO: 8624 - protein, 17 aa, Artificial Sequence
  Synthetically generated peptide
  VARIANT (1)..(17): Xaa = Any Amino Acid
ACEXYXCANPACXTGXC

SEQ ID NO: 8625 - protein, 16 aa, Artificial Sequence
  Synthetically generated peptide
  VARIANT (1)..(16): Xaa = Any Amino Acid
ACEXYXCANPACTXGC

SEQ ID NO: 8626 - protein, 17 aa, Artificial Sequence
  Synthetically generated peptide
  VARIANT (1)..(17): Xaa = Any Amino Acid
ACEXYXCANPACTXXGC

SEQ ID NO: 8627 - protein, 17 aa, Artificial Sequence
  Synthetically generated peptide
  VARIANT (1)..(17): Xaa = Any Amino Acid
ACEXYXCANPACTXGXC

SEQ ID NO: 8628 - protein, 16 aa, Artificial Sequence
  Synthetically generated peptide
  VARIANT (1)..(16): Xaa = Any Amino Acid
ACEXYXCANPACTGXC

SEQ ID NO: 8629 - protein, 17 aa, Artificial Sequence
  Synthetically generated peptide
  VARIANT (1)..(17): Xaa = Any Amino Acid
ACEXYXCANPACTGXXC

SEQ ID NO: 8630 - protein, 15 aa, Artificial Sequence
  Synthetically generated peptide
  VARIANT (1)..(15): Xaa = Any Amino Acid
ACEXYCAXNPACTGC

SEQ ID NO: 8631 - protein, 16 aa, Artificial Sequence
  Synthetically generated peptide
  VARIANT (1)..(16): Xaa = Any Amino Acid
ACEXYCAXXNPACTGC

SEQ ID NO: 8632 - protein, 17 aa, Artificial Sequence
  Synthetically generated peptide
  VARIANT (1)..(17): Xaa = Any Amino Acid
ACEXYCAXXXNPACTGC

SEQ ID NO: 8633 - protein, 17 aa, Artificial Sequence
  Synthetically generated peptide
  VARIANT (1)..(17): Xaa = Any Amino Acid
ACEXYCAXXNXPACTGC

SEQ ID NO: 8634 - protein, 17 aa, Artificial Sequence
  Synthetically generated peptide
  VARIANT (1)..(17): Xaa = Any Amino Acid
ACEXYCAXXNPXACTGC

SEQ ID NO: 8635 - protein, 17 aa, Artificial Sequence
  Synthetically generated peptide
  VARIANT (1)..(17): Xaa = Any Amino Acid
ACEXYCAXXNPAXCTGC

SEQ ID NO: 8636 - protein, 17 aa, Artificial Sequence
  Synthetically generated peptide
  VARIANT (1)..(17): Xaa = Any Amino Acid
ACEXYCAXXNPACXTGC

SEQ ID NO: 8637 - protein, 17 aa, Artificial Sequence
  Synthetically generated peptide
  VARIANT (1)..(17): Xaa = Any Amino Acid
ACEXYCAXXNPACTXGC

SEQ ID NO: 8638 - protein, 17 aa, Artificial Sequence
  Synthetically generated peptide
  VARIANT (1)..(17): Xaa = Any Amino Acid
ACEXYCAXXNPACTGXC

SEQ ID NO: 8639 - protein, 16 aa, Artificial Sequence
  Synthetically generated peptide
  VARIANT (1)..(16): Xaa = Any Amino Acid
ACEXYCAXNXPACTGC

SEQ ID NO: 8640 - protein, 17 aa, Artificial Sequence
  Synthetically generated peptide
  VARIANT (1)..(17): Xaa = Any Amino Acid
ACEXYCAXNXXPACTGC

SEQ ID NO: 8641 - protein, 17 aa, Artificial Sequence
  Synthetically generated peptide
  VARIANT (1)..(17): Xaa = Any Amino Acid
ACEXYCAXNXPXACTGC

SEQ ID NO: 8642 - protein, 17 aa, Artificial Sequence
  Synthetically generated peptide
  VARIANT (1)..(17): Xaa = Any Amino Acid
ACEXYCAXNXPAXCTGC

SEQ ID NO: 8643 - protein, 17 aa, Artificial Sequence
  Synthetically generated peptide
  VARIANT (1)..(17): Xaa = Any Amino Acid
ACEXYCAXNXPACXTGC

SEQ ID NO: 8644 - protein, 17 aa, Artificial Sequence
  Synthetically generated peptide
  VARIANT (1)..(17): Xaa = Any Amino Acid
ACEXYCAXNXPACTXGC

SEQ ID NO: 8645 - protein, 17 aa, Artificial Sequence
  Synthetically generated peptide
  VARIANT (1)..(17): Xaa = Any Amino Acid
ACEXYCAXNXPACTGXC

SEQ ID NO: 8646 - protein, 16 aa, Artificial Sequence
  Synthetically generated peptide
  VARIANT (1)..(16): Xaa = Any Amino Acid
ACEXYCAXNPXACTGC

SEQ ID NO: 8647 - protein, 17 aa, Artificial Sequence
  Synthetically generated peptide
  VARIANT (1)..(17): Xaa = Any Amino Acid
ACEXYCAXNPXXACTGC

SEQ ID NO: 8648 - protein, 17 aa, Artificial Sequence
  Synthetically generated peptide
  VARIANT (1)..(17): Xaa = Any Amino Acid
ACEXYCAXNPXAXCTGC

SEQ ID NO: 8649 - protein, 17 aa, Artificial Sequence
  Synthetically generated peptide
  VARIANT (1)..(17): Xaa = Any Amino Acid
ACEXYCAXNPXACXTGC

SEQ ID NO: 8650 - protein, 17 aa, Artificial Sequence
  Synthetically generated peptide
  VARIANT (1)..(17): Xaa = Any Amino Acid
ACEXYCAXNPXACTXGC

SEQ ID NO: 8651 - protein, 17 aa, Artificial Sequence
  Synthetically generated peptide
  VARIANT (1)..(17): Xaa = Any Amino Acid
ACEXYCAXNPXACTGXC

SEQ ID NO: 8652 - protein, 16 aa, Artificial Sequence
  Synthetically generated peptide
  VARIANT (1)..(16): Xaa = Any Amino Acid
ACEXYCAXNPAXCTGC

SEQ ID NO: 8653 - protein, 17 aa, Artificial Sequence
  Synthetically generated peptide
  VARIANT (1)..(17): Xaa = Any Amino Acid
ACEXYCAXNPAXXCTGC

SEQ ID NO: 8654 - protein, 17 aa, Artificial Sequence
  Synthetically generated peptide
  VARIANT (1)..(17): Xaa = Any Amino Acid
ACEXYCAXNPAXCXTGC

SEQ ID NO: 8655 - protein, 17 aa, Artificial Sequence
  Synthetically generated peptide
  VARIANT (1)..(17): Xaa = Any Amino Acid
ACEXYCAXNPAXCTXGC

SEQ ID NO: 8656 - protein, 17 aa, Artificial Sequence
  Synthetically generated peptide
  VARIANT (1)..(17): Xaa = Any Amino Acid
ACEXYCAXNPAXCTGXC

SEQ ID NO: 8657 - protein, 16 aa, Artificial Sequence
  Synthetically generated peptide
  VARIANT (1)..(16): Xaa = Any Amino Acid
ACEXYCAXNPACXTGC

SEQ ID NO: 8658 - protein, 17 aa, Artificial Sequence
  Synthetically generated peptide
  VARIANT (1)..(17): Xaa = Any Amino Acid
ACEXYCAXNPACXXTGC

SEQ ID NO: 8659 - protein, 17 aa, Artificial Sequence
  Synthetically generated peptide
  VARIANT (1)..(17): Xaa = Any Amino Acid
ACEXYCAXNPACXTXGC

SEQ ID NO: 8660 - protein, 17 aa, Artificial Sequence
  Synthetically generated peptide
  VARIANT (1)..(17): Xaa = Any Amino Acid
ACEXYCAXNPACXTGXC

SEQ ID NO: 8661 - protein, 16 aa, Artificial Sequence
  Synthetically generated peptide
  VARIANT (1)..(16): Xaa = Any Amino Acid
ACEXYCAXNPACTXGC

SEQ ID NO: 8662 - protein, 17 aa, Artificial Sequence
  Synthetically generated peptide
  VARIANT (1)..(17): Xaa = Any Amino Acid
ACEXYCAXNPACTXXGC

SEQ ID NO: 8663 - protein, 17 aa, Artificial Sequence
  Synthetically generated peptide
  VARIANT (1)..(17): Xaa = Any Amino Acid
ACEXYCAXNPACTXGXC

SEQ ID NO: 8664 - protein, 16 aa, Artificial Sequence
  Synthetically generated peptide
  VARIANT (1)..(16): Xaa = Any Amino Acid
ACEXYCAXNPACTGXC

SEQ ID NO: 8665 - protein, 17 aa, Artificial Sequence
  Synthetically generated peptide
  VARIANT (1)..(17): Xaa = Any Amino Acid
ACEXYCAXNPACTGXXC

SEQ ID NO: 8666 - protein, 15 aa, Artificial Sequence
  Synthetically generated peptide
  VARIANT (1)..(15): Xaa = Any Amino Acid
ACEXYCANXPACTGC

SEQ ID NO: 8667 - protein, 16 aa, Artificial Sequence
  Synthetically generated peptide
  VARIANT (1)..(16): Xaa = Any Amino Acid
ACEXYCANXXPACTGC

SEQ ID NO: 8668 - protein, 17 aa, Artificial Sequence
  Synthetically generated peptide
  VARIANT (1)..(17): Xaa = Any Amino Acid
ACEXYCANXXXPACTGC

SEQ ID NO: 8669 - protein, 17 aa, Artificial Sequence
  Synthetically generated peptide
  VARIANT (1)..(17): Xaa = Any Amino Acid
ACEXYCANXXPXACTGC

SEQ ID NO: 8670 - protein, 17 aa, Artificial Sequence
  Synthetically generated peptide
  VARIANT (1)..(17): Xaa = Any Amino Acid
ACEXYCANXXPAXCTGC

SEQ ID NO: 8671 - protein, 17 aa, Artificial Sequence
  Synthetically generated peptide
  VARIANT (1)..(17): Xaa = Any Amino Acid
ACEXYCANXXPACXTGC

SEQ ID NO: 8672 - protein, 17 aa, Artificial Sequence
  Synthetically generated peptide
  VARIANT (1)..(17): Xaa = Any Amino Acid
ACEXYCANXXPACTXGC

SEQ ID NO: 8673 - protein, 17 aa, Artificial Sequence
  Synthetically generated peptide
  VARIANT (1)..(17): Xaa = Any Amino Acid
ACEXYCANXXPACTGXC

SEQ ID NO: 8674 - protein, 16 aa, Artificial Sequence
  Synthetically generated peptide
  VARIANT (1)..(16): Xaa = Any Amino Acid
ACEXYCANXPXACTGC

SEQ ID NO: 8675 - protein, 17 aa, Artificial Sequence
  Synthetically generated peptide
  VARIANT (1)..(17): Xaa = Any Amino Acid
ACEXYCANXPXXACTGC

SEQ ID NO: 8676 - protein, 17 aa, Artificial Sequence
  Synthetically generated peptide
  VARIANT (1)..(17): Xaa = Any Amino Acid
ACEXYCANXPXAXCTGC

SEQ ID NO: 8677 - protein, 17 aa, Artificial Sequence
  Synthetically generated peptide
  VARIANT (1)..(17): Xaa = Any Amino Acid
ACEXYCANXPXACXTGC

SEQ ID NO: 8678 - protein, 17 aa, Artificial Sequence
  Synthetically generated peptide
  VARIANT (1)..(17): Xaa = Any Amino Acid
ACEXYCANXPXACTXGC

SEQ ID NO: 8679 - protein, 17 aa, Artificial Sequence
  Synthetically generated peptide
  VARIANT (1)..(17): Xaa = Any Amino Acid
ACEXYCANXPXACTGXC

SEQ ID NO: 8680 - protein, 16 aa, Artificial Sequence
  Synthetically generated peptide
  VARIANT (1)..(16): Xaa = Any Amino Acid
ACEXYCANXPAXCTGC

SEQ ID NO: 8681 - protein, 17 aa, Artificial Sequence
  Synthetically generated peptide
  VARIANT (1)..(17): Xaa = Any Amino Acid
ACEXYCANXPAXXCTGC

SEQ ID NO: 8682 - protein, 17 aa, Artificial Sequence
  Synthetically generated peptide
  VARIANT (1)..(17): Xaa = Any Amino Acid
ACEXYCANXPAXCXTGC

SEQ ID NO: 8683 - protein, 17 aa, Artificial Sequence
  Synthetically generated peptide
  VARIANT (1)..(17): Xaa = Any Amino Acid
ACEXYCANXPAXCTXGC

SEQ ID NO: 8684 - protein, 17 aa, Artificial Sequence
  Synthetically generated peptide
  VARIANT (1)..(17): Xaa = Any Amino Acid
ACEXYCANXPAXCTGXC

SEQ ID NO: 8685 - protein, 16 aa, Artificial Sequence
  Synthetically generated peptide
  VARIANT (1)..(16): Xaa = Any Amino Acid
ACEXYCANXPACXTGC

SEQ ID NO: 8686 - protein, 17 aa, Artificial Sequence
  Synthetically generated peptide
  VARIANT (1)..(17): Xaa = Any Amino Acid
ACEXYCANXPACXXTGC

SEQ ID NO: 8687 - protein, 17 aa, Artificial Sequence
  Synthetically generated peptide
  VARIANT (1)..(17): Xaa = Any Amino Acid
ACEXYCANXPACXTXGC

SEQ ID NO: 8688 - protein, 17 aa, Artificial Sequence
  Synthetically generated peptide
  VARIANT (1)..(17): Xaa = Any Amino Acid
ACEXYCANXPACXTGXC

SEQ ID NO: 8689 - protein, 16 aa, Artificial Sequence
  Synthetically generated peptide
  VARIANT (1)..(16): Xaa = Any Amino Acid
ACEXYCANXPACTXGC

SEQ ID NO: 8690 - protein, 17 aa, Artificial Sequence
  Synthetically generated peptide
  VARIANT (1)..(17): Xaa = Any Amino Acid
ACEXYCANXPACTXXGC

SEQ ID NO: 8691 - protein, 17 aa, Artificial Sequence
  Synthetically generated peptide
  VARIANT (1)..(17): Xaa = Any Amino Acid
ACEXYCANXPACTXGXC

SEQ ID NO: 8692 - protein, 16 aa, Artificial Sequence
  Synthetically generated peptide
  VARIANT (1)..(16): Xaa = Any Amino Acid
ACEXYCANXPACTGXC

SEQ ID NO: 8693 - protein, 17 aa, Artificial Sequence
  Synthetically generated peptide
  VARIANT (1)..(17): Xaa = Any Amino Acid
ACEXYCANXPACTGXXC

SEQ ID NO: 8694 - protein, 15 aa, Artificial Sequence
  Synthetically generated peptide
  VARIANT (1)..(15): Xaa = Any Amino Acid
ACEXYCANPXACTGC

SEQ ID NO: 8695 - protein, 16 aa, Artificial Sequence
  Synthetically generated peptide
  VARIANT (1)..(16): Xaa = Any Amino Acid
ACEXYCANPXXACTGC

SEQ ID NO: 8696 - protein, 17 aa, Artificial Sequence
  Synthetically generated peptide
  VARIANT (1)..(17): Xaa = Any Amino Acid
ACEXYCANPXXXACTGC

SEQ ID NO: 8697 - protein, 17 aa, Artificial Sequence
  Synthetically generated peptide
  VARIANT (1)..(17): Xaa = Any Amino Acid
ACEXYCANPXXAXCTGC

SEQ ID NO: 8698 - protein, 17 aa, Artificial Sequence
  Synthetically generated peptide
  VARIANT (1)..(17): Xaa = Any Amino Acid
ACEXYCANPXXACXTGC

SEQ ID NO: 8699 - protein, 17 aa, Artificial Sequence
  Synthetically generated peptide
  VARIANT (1)..(17): Xaa = Any Amino Acid
ACEXYCANPXXACTXGC

SEQ ID NO: 8700 - protein, 17 aa, Artificial Sequence
  Synthetically generated peptide
  VARIANT (1)..(17): Xaa = Any Amino Acid
ACEXYCANPXXACTGXC

SEQ ID NO: 8701 - protein, 16 aa, Artificial Sequence
  Synthetically generated peptide
  VARIANT (1)..(16): Xaa = Any Amino Acid
ACEXYCANPXAXCTGC

SEQ ID NO: 8702 - protein, 17 aa, Artificial Sequence
  Synthetically generated peptide
  VARIANT (1)..(17): Xaa = Any Amino Acid
ACEXYCANPXAXXCTGC

SEQ ID NO: 8703 - protein, 17 aa, Artificial Sequence
  Synthetically generated peptide
  VARIANT (1)..(17): Xaa = Any Amino Acid
ACEXYCANPXAXCXTGC

SEQ ID NO: 8704 - protein, 17 aa, Artificial Sequence
  Synthetically generated peptide
  VARIANT (1)..(17): Xaa = Any Amino Acid
ACEXYCANPXAXCTXGC

SEQ ID NO: 8705 - protein, 17 aa, Artificial Sequence
  Synthetically generated peptide
  VARIANT (1)..(17): Xaa = Any Amino Acid
ACEXYCANPXAXCTGXC

SEQ ID NO: 8706 - protein, 16 aa, Artificial Sequence
  Synthetically generated peptide
  VARIANT (1)..(16): Xaa = Any Amino Acid
ACEXYCANPXACXTGC

SEQ ID NO: 8707 - protein, 17 aa, Artificial Sequence
  Synthetically generated peptide
  VARIANT (1)..(17): Xaa = Any Amino Acid
ACEXYCANPXACXXTGC

SEQ ID NO: 8708 - protein, 17 aa, Artificial Sequence
  Synthetically generated peptide
  VARIANT (1)..(17): Xaa = Any Amino Acid
ACEXYCANPXACXTXGC

SEQ ID NO: 8709 - protein, 17 aa, Artificial Sequence
  Synthetically generated peptide
  VARIANT (1)..(17): Xaa = Any Amino Acid
ACEXYCANPXACXTGXC

SEQ ID NO: 8710 - protein, 16 aa, Artificial Sequence
  Synthetically generated peptide
  VARIANT (1)..(16): Xaa = Any Amino Acid
ACEXYCANPXACTXGC

SEQ ID NO: 8711 - protein, 17 aa, Artificial Sequence
  Synthetically generated peptide
  VARIANT (1)..(17): Xaa = Any Amino Acid
ACEXYCANPXACTXXGC

SEQ ID NO: 8712 - protein, 17 aa, Artificial Sequence
  Synthetically generated peptide
  VARIANT (1)..(17): Xaa = Any Amino Acid
ACEXYCANPXACTXGXC

SEQ ID NO: 8713 - protein, 16 aa, Artificial Sequence
  Synthetically generated peptide
  VARIANT (1)..(16): Xaa = Any Amino Acid
ACEXYCANPXACTGXC

SEQ ID NO: 8714 - protein, 17 aa, Artificial Sequence
  Synthetically generated peptide
  VARIANT (1)..(17): Xaa = Any Amino Acid
ACEXYCANPXACTGXXC

SEQ ID NO: 8715 - protein, 15 aa, Artificial Sequence
  Synthetically generated peptide
  VARIANT (1)..(15): Xaa = Any Amino Acid
ACEXYCANPAXCTGC

SEQ ID NO: 8716 - protein, 16 aa, Artificial Sequence
  Synthetically generated peptide
  VARIANT (1)..(16): Xaa = Any Amino Acid
ACEXYCANPAXXCTGC

SEQ ID NO: 8717 - protein, 17 aa, Artificial Sequence
  Synthetically generated peptide
  VARIANT (1)..(17): Xaa = Any Amino Acid
ACEXYCANPAXXXCTGC

SEQ ID NO: 8718 - protein, 17 aa, Artificial Sequence
  Synthetically generated peptide
  VARIANT (1)..(17): Xaa = Any Amino Acid
ACEXYCANPAXXCXTGC

SEQ ID NO: 8719 - protein, 17 aa, Artificial Sequence
  Synthetically generated peptide
  VARIANT (1)..(17): Xaa = Any Amino Acid
ACEXYCANPAXXCTXGC

SEQ ID NO: 8720 - protein, 17 aa, Artificial Sequence
  Synthetically generated peptide
  VARIANT (1)..(17): Xaa = Any Amino Acid
ACEXYCANPAXXCTGXC

SEQ ID NO: 8721 - protein, 16 aa, Artificial Sequence
  Synthetically generated peptide
  VARIANT (1)..(16): Xaa = Any Amino Acid
ACEXYCANPAXCXTGC

SEQ ID NO: 8722 - protein, 17 aa, Artificial Sequence
  Synthetically generated peptide
  VARIANT (1)..(17): Xaa = Any Amino Acid
ACEXYCANPAXCXXTGC

SEQ ID NO: 8723 - protein, 17 aa, Artificial Sequence
  Synthetically generated peptide
  VARIANT (1)..(17): Xaa = Any Amino Acid
ACEXYCANPAXCXTXGC

SEQ ID NO: 8724 - protein, 17 aa, Artificial Sequence
  Synthetically generated peptide
  VARIANT (1)..(17): Xaa = Any Amino Acid
ACEXYCANPAXCXTGXC

SEQ ID NO: 8725 - protein, 16 aa, Artificial Sequence
  Synthetically generated peptide
  VARIANT (1)..(16): Xaa = Any Amino Acid
ACEXYCANPAXCTXGC

SEQ ID NO: 8726 - protein, 17 aa, Artificial Sequence
  Synthetically generated peptide
  VARIANT (1)..(17): Xaa = Any Amino Acid
ACEXYCANPAXCTXXGC

SEQ ID NO: 8727 - protein, 17 aa, Artificial Sequence
  Synthetically generated peptide
  VARIANT (1)..(17): Xaa = Any Amino Acid
ACEXYCANPAXCTXGXC

SEQ ID NO: 8728 - protein, 16 aa, Artificial Sequence
  Synthetically generated peptide
  VARIANT (1)..(16): Xaa = Any Amino Acid
ACEXYCANPAXCTGXC

SEQ ID NO: 8729 - protein, 17 aa, Artificial Sequence
  Synthetically generated peptide
  VARIANT (1)..(17): Xaa = Any Amino Acid
ACEXYCANPAXCTGXXC

SEQ ID NO: 8730 - protein, 15 aa, Artificial Sequence
  Synthetically generated peptide
  VARIANT (1)..(15): Xaa = Any Amino Acid
ACEXYCANPACXTGC

SEQ ID NO: 8731 - protein, 16 aa, Artificial Sequence
  Synthetically generated peptide
  VARIANT (1)..(16): Xaa = Any Amino Acid
ACEXYCANPACXXTGC

SEQ ID NO: 8732 - protein, 17 aa, Artificial Sequence
  Synthetically generated peptide
  VARIANT (1)..(17): Xaa = Any Amino Acid
ACEXYCANPACXXXTGC

SEQ ID NO: 8733 - protein, 17 aa, Artificial Sequence
  Synthetically generated peptide
  VARIANT (1)..(17): Xaa = Any Amino Acid
ACEXYCANPACXXTXGC

SEQ ID NO: 8734 - protein, 17 aa, Artificial Sequence
  Synthetically generated peptide
  VARIANT (1)..(17): Xaa = Any Amino Acid
ACEXYCANPACXXTGXC

SEQ ID NO: 8735 - protein, 16 aa, Artificial Sequence
  Synthetically generated peptide
  VARIANT (1)..(16): Xaa = Any Amino Acid
ACEXYCANPACXTXGC

SEQ ID NO: 8736 - protein, 17 aa, Artificial Sequence
  Synthetically generated peptide
  VARIANT (1)..(17): Xaa = Any Amino Acid
ACEXYCANPACXTXXGC

SEQ ID NO: 8737 - protein, 17 aa, Artificial Sequence
  Synthetically generated peptide
  VARIANT (1)..(17): Xaa = Any Amino Acid
ACEXYCANPACXTXGXC

SEQ ID NO: 8738 - protein, 16 aa, Artificial Sequence
  Synthetically generated peptide
  VARIANT (1)..(16): Xaa = Any Amino Acid
ACEXYCANPACXTGXC

SEQ ID NO: 8739 - protein, 17 aa, Artificial Sequence
  Synthetically generated peptide
  VARIANT (1)..(17): Xaa = Any Amino Acid
ACEXYCANPACXTGXXC

SEQ ID NO: 8740 - protein, 15 aa, Artificial Sequence
  Synthetically generated peptide
  VARIANT (1)..(15): Xaa = Any Amino Acid
ACEXYCANPACTXGC

SEQ ID NO: 8741 - protein, 16 aa, Artificial Sequence
  Synthetically generated peptide
  VARIANT (1)..(16): Xaa = Any Amino Acid
ACEXYCANPACTXXGC

SEQ ID NO: 8742 - protein, 17 aa, Artificial Sequence
  Synthetically generated peptide
  VARIANT (1)..(17): Xaa = Any Amino Acid
ACEXYCANPACTXXXGC

SEQ ID NO: 8743 - protein, 17 aa, Artificial Sequence
  Synthetically generated peptide
  VARIANT (1)..(17): Xaa = Any Amino Acid
ACEXYCANPACTXXGXC

SEQ ID NO: 8744 - protein, 16 aa, Artificial Sequence
  Synthetically generated peptide
  VARIANT (1)..(16): Xaa = Any Amino Acid
ACEXYCANPACTXGXC

SEQ ID NO: 8745 - protein, 17 aa, Artificial Sequence
  Synthetically generated peptide
  VARIANT (1)..(17): Xaa = Any Amino Acid
ACEXYCANPACTXGXXC

SEQ ID NO: 8746 - protein, 15 aa, Artificial Sequence
  Synthetically generated peptide
  VARIANT (1)..(15): Xaa = Any Amino Acid
ACEXYCANPACTGXC

SEQ ID NO: 8747 - protein, 16 aa, Artificial Sequence
  Synthetically generated peptide
  VARIANT (1)..(16): Xaa = Any Amino Acid
ACEXYCANPACTGXXC

SEQ ID NO: 8748 - protein, 17 aa, Artificial Sequence
  Synthetically generated peptide
  VARIANT (1)..(17): Xaa = Any Amino Acid
ACEXYCANPACTGXXXC

SEQ ID NO: 8749 - protein, 14 aa, Artificial Sequence
  Synthetically generated peptide
  VARIANT (1)..(14): Xaa = Any Amino Acid
ACEYXCANPACTGC

SEQ ID NO: 8750 - protein, 15 aa, Artificial Sequence
  Synthetically generated peptide
  VARIANT (1)..(15): Xaa = Any Amino Acid
ACEYXXCANPACTGC

SEQ ID NO: 8751 - protein, 16 aa, Artificial Sequence
  Synthetically generated peptide
  VARIANT (1)..(16): Xaa = Any Amino Acid
ACEYXXXCANPACTGC

SEQ ID NO: 8752 - protein, 17 aa, Artificial Sequence
  Synthetically generated peptide
  VARIANT (1)..(17): Xaa = Any Amino Acid
ACEYXXXXCANPACTGC

SEQ ID NO: 8753 - protein, 17 aa, Artificial Sequence
  Synthetically generated peptide
  VARIANT (1)..(17): Xaa = Any Amino Acid
ACEYXXXCAXNPACTGC

SEQ ID NO: 8754 - protein, 17 aa, Artificial Sequence
  Synthetically generated peptide
  VARIANT (1)..(17): Xaa = Any Amino Acid
ACEYXXXCANXPACTGC

SEQ ID NO: 8755 - protein, 17 aa, Artificial Sequence
  Synthetically generated peptide
  VARIANT (1)..(17): Xaa = Any Amino Acid
ACEYXXXCANPXACTGC

SEQ ID NO: 8756 - protein, 17 aa, Artificial Sequence
  Synthetically generated peptide
  VARIANT (1)..(17): Xaa = Any Amino Acid
ACEYXXXCANPAXCTGC

SEQ ID NO: 8757 - protein, 17 aa, Artificial Sequence
  Synthetically generated peptide
  VARIANT (1)..(17): Xaa = Any Amino Acid
ACEYXXXCANPACXTGC

SEQ ID NO: 8758 - protein, 17 aa, Artificial Sequence
  Synthetically generated peptide
  VARIANT (1)..(17): Xaa = Any Amino Acid
ACEYXXXCANPACTXGC

SEQ ID NO: 8759 - protein, 17 aa, Artificial Sequence
  Synthetically generated peptide
  VARIANT (1)..(17): Xaa = Any Amino Acid
ACEYXXXCANPACTGXC

SEQ ID NO: 8760 - protein, 16 aa, Artificial Sequence
  Synthetically generated peptide
  VARIANT (1)..(16): Xaa = Any Amino Acid
ACEYXXCAXNPACTGC

SEQ ID NO: 8761 - protein, 17 aa, Artificial Sequence
  Synthetically generated peptide
  VARIANT (1)..(17): Xaa = Any Amino Acid
ACEYXXCAXXNPACTGC

SEQ ID NO: 8762 - protein, 17 aa, Artificial Sequence
  Synthetically generated peptide
  VARIANT (1)..(17): Xaa = Any Amino Acid
ACEYXXCAXNXPACTGC

SEQ ID NO: 8763 - protein, 17 aa, Artificial Sequence
  Synthetically generated peptide
  VARIANT (1)..(17): Xaa = Any Amino Acid
ACEYXXCAXNPXACTGC

SEQ ID NO: 8764 - protein, 17 aa, Artificial Sequence
  Synthetically generated peptide
  VARIANT (1)..(17): Xaa = Any Amino Acid
ACEYXXCAXNPAXCTGC

SEQ ID NO: 8765 - protein, 17 aa, Artificial Sequence
  Synthetically generated peptide
  VARIANT (1)..(17): Xaa = Any Amino Acid
ACEYXXCAXNPACXTGC

SEQ ID NO: 8766 - protein, 17 aa, Artificial Sequence
  Synthetically generated peptide
  VARIANT (1)..(17): Xaa = Any Amino Acid
ACEYXXCAXNPACTXGC

SEQ ID NO: 8767 - protein, 17 aa, Artificial Sequence
  Synthetically generated peptide
  VARIANT (1)..(17): Xaa = Any Amino Acid
ACEYXXCAXNPACTGXC

SEQ ID NO: 8768 - protein, 16 aa, Artificial Sequence
  Synthetically generated peptide
  VARIANT (1)..(16): Xaa = Any Amino Acid
ACEYXXCANXPACTGC

SEQ ID NO: 8769 - protein, 17 aa, Artificial Sequence
  Synthetically generated peptide
  VARIANT (1)..(17): Xaa = Any Amino Acid
ACEYXXCANXXPACTGC

SEQ ID NO: 8770 - protein, 17 aa, Artificial Sequence
  Synthetically generated peptide
  VARIANT (1)..(17): Xaa = Any Amino Acid
ACEYXXCANXPXACTGC

SEQ ID NO: 8771 - protein, 17 aa, Artificial Sequence
  Synthetically generated peptide
  VARIANT (1)..(17): Xaa = Any Amino Acid
ACEYXXCANXPAXCTGC

SEQ ID NO: 8772 - protein, 17 aa, Artificial Sequence
  Synthetically generated peptide
  VARIANT (1)..(17): Xaa = Any Amino Acid
ACEYXXCANXPACXTGC

SEQ ID NO: 8773 - protein, 17 aa, Artificial Sequence
  Synthetically generated peptide
  VARIANT (1)..(17): Xaa = Any Amino Acid
ACEYXXCANXPACTXGC

SEQ ID NO: 8774 - protein, 17 aa, Artificial Sequence
  Synthetically generated peptide
  VARIANT (1)..(17): Xaa = Any Amino Acid
ACEYXXCANXPACTGXC

SEQ ID NO: 8775 - protein, 16 aa, Artificial Sequence
  Synthetically generated peptide
  VARIANT (1)..(16): Xaa = Any Amino Acid
ACEYXXCANPXACTGC

SEQ ID NO: 8776 - protein, 17 aa, Artificial Sequence
  Synthetically generated peptide
  VARIANT (1)..(17): Xaa = Any Amino Acid
ACEYXXCANPXXACTGC

SEQ ID NO: 8777 - protein, 17 aa, Artificial Sequence
  Synthetically generated peptide
  VARIANT (1)..(17): Xaa = Any Amino Acid
ACEYXXCANPXAXCTGC

SEQ ID NO: 8778 - protein, 17 aa, Artificial Sequence
  Synthetically generated peptide
  VARIANT (1)..(17): Xaa = Any Amino Acid
ACEYXXCANPXACXTGC

SEQ ID NO: 8779 - protein, 17 aa, Artificial Sequence
  Synthetically generated peptide
  VARIANT (1)..(17): Xaa = Any Amino Acid
ACEYXXCANPXACTXGC

SEQ ID NO: 8780 - protein, 17 aa, Artificial Sequence
  Synthetically generated peptide
  VARIANT (1)..(17): Xaa = Any Amino Acid
ACEYXXCANPXACTGXC

SEQ ID NO: 8781 - protein, 16 aa, Artificial Sequence
  Synthetically generated peptide
  VARIANT (1)..(16): Xaa = Any Amino Acid
ACEYXXCANPAXCTGC

SEQ ID NO: 8782 - protein, 17 aa, Artificial Sequence
  Synthetically generated peptide
  VARIANT (1)..(17): Xaa = Any Amino Acid
ACEYXXCANPAXXCTGC

SEQ ID NO: 8783 - protein, 17 aa, Artificial Sequence
  Synthetically generated peptide
  VARIANT (1)..(17): Xaa = Any Amino Acid
ACEYXXCANPAXCXTGC

SEQ ID NO: 8784 - protein, 17 aa, Artificial Sequence
  Synthetically generated peptide
  VARIANT (1)..(17): Xaa = Any Amino Acid
ACEYXXCANPAXCTXGC

SEQ ID NO: 8785 - protein, 17 aa, Artificial Sequence
  Synthetically generated peptide
  VARIANT (1)..(17): Xaa = Any Amino Acid
ACEYXXCANPAXCTGXC

SEQ ID NO: 8786 - protein, 16 aa, Artificial Sequence
  Synthetically generated peptide
  VARIANT (1)..(16): Xaa = Any Amino Acid
ACEYXXCANPACXTGC

SEQ ID NO: 8787 - protein, 17 aa, Artificial Sequence
  Synthetically generated peptide
  VARIANT (1)..(17): Xaa = Any Amino Acid
ACEYXXCANPACXXTGC

SEQ ID NO: 8788 - protein, 17 aa, Artificial Sequence
  Synthetically generated peptide
  VARIANT (1)..(17): Xaa = Any Amino Acid
ACEYXXCANPACXTXGC

SEQ ID NO: 8789 - protein, 17 aa, Artificial Sequence
  Synthetically generated peptide
  VARIANT (1)..(17): Xaa = Any Amino Acid
ACEYXXCANPACXTGXC

SEQ ID NO: 8790 - protein, 16 aa, Artificial Sequence
  Synthetically generated peptide
  VARIANT (1)..(16): Xaa = Any Amino Acid
ACEYXXCANPACTXGC

SEQ ID NO: 8791 - protein, 17 aa, Artificial Sequence
  Synthetically generated peptide
  VARIANT (1)..(17): Xaa = Any Amino Acid
ACEYXXCANPACTXXGC

SEQ ID NO: 8792 - protein, 17 aa, Artificial Sequence
  Synthetically generated peptide
  VARIANT (1)..(17): Xaa = Any Amino Acid
ACEYXXCANPACTXGXC

SEQ ID NO: 8793 - protein, 16 aa, Artificial Sequence
  Synthetically generated peptide
  VARIANT (1)..(16): Xaa = Any Amino Acid
ACEYXXCANPACTGXC

SEQ ID NO: 8794 - protein, 17 aa, Artificial Sequence
  Synthetically generated peptide
  VARIANT (1)..(17): Xaa = Any Amino Acid
ACEYXXCANPACTGXXC

SEQ ID NO: 8795 - protein, 15 aa, Artificial Sequence
  Synthetically generated peptide
  VARIANT (1)..(15): Xaa = Any Amino Acid
ACEYXCAXNPACTGC

SEQ ID NO: 8796 - protein, 16 aa, Artificial Sequence
  Synthetically generated peptide
  VARIANT (1)..(16): Xaa = Any Amino Acid
ACEYXCAXXNPACTGC

SEQ ID NO: 8797 - protein, 17 aa, Artificial Sequence
  Synthetically generated peptide
  VARIANT (1)..(17): Xaa = Any Amino Acid
ACEYXCAXXXNPACTGC

SEQ ID NO: 8798 - protein, 17 aa, Artificial Sequence
  Synthetically generated peptide
  VARIANT (1)..(17): Xaa = Any Amino Acid
ACEYXCAXXNXPACTGC

SEQ ID NO: 8799 - protein, 17 aa, Artificial Sequence
  Synthetically generated peptide
  VARIANT (1)..(17): Xaa = Any Amino Acid
ACEYXCAXXNPXACTGC

SEQ ID NO: 8800 - protein, 17 aa, Artificial Sequence
  Synthetically generated peptide
  VARIANT (1)..(17): Xaa = Any Amino Acid
ACEYXCAXXNPAXCTGC

SEQ ID NO: 8801 - protein, 17 aa, Artificial Sequence
  Synthetically generated peptide
  VARIANT (1)..(17): Xaa = Any Amino Acid
ACEYXCAXXNPACXTGC

SEQ ID NO: 8802 - protein, 17 aa, Artificial Sequence
  Synthetically generated peptide
  VARIANT (1)..(17): Xaa = Any Amino Acid
ACEYXCAXXNPACTXGC

SEQ ID NO: 8803 - protein, 17 aa, Artificial Sequence
  Synthetically generated peptide
  VARIANT (1)..(17): Xaa = Any Amino Acid
ACEYXCAXXNPACTGXC

SEQ ID NO: 8804 - protein, 16 aa, Artificial Sequence
  Synthetically generated peptide
  VARIANT (1)..(16): Xaa = Any Amino Acid
ACEYXCAXNXPACTGC

SEQ ID NO: 8805 - protein, 17 aa, Artificial Sequence
  Synthetically generated peptide
  VARIANT (1)..(17): Xaa = Any Amino Acid
ACEYXCAXNXXPACTGC

SEQ ID NO: 8806 - protein, 17 aa, Artificial Sequence
  Synthetically generated peptide
  VARIANT (1)..(17): Xaa = Any Amino Acid
ACEYXCAXNXPXACTGC

SEQ ID NO: 8807 - protein, 17 aa, Artificial Sequence
  Synthetically generated peptide
  VARIANT (1)..(17): Xaa = Any Amino Acid
ACEYXCAXNXPAXCTGC

SEQ ID NO: 8808 - protein, 17 aa, Artificial Sequence
  Synthetically generated peptide
  VARIANT (1)..(17): Xaa = Any Amino Acid
ACEYXCAXNXPACXTGC

SEQ ID NO: 8809 - protein, 17 aa, Artificial Sequence
  Synthetically generated peptide
  VARIANT (1)..(17): Xaa = Any Amino Acid
ACEYXCAXNXPACTXGC

SEQ ID NO: 8810 - protein, 17 aa, Artificial Sequence
  Synthetically generated peptide
  VARIANT (1)..(17): Xaa = Any Amino Acid
ACEYXCAXNXPACTGXC

SEQ ID NO: 8811 - protein, 16 aa, Artificial Sequence
  Synthetically generated peptide
  VARIANT (1)..(16): Xaa = Any Amino Acid
ACEYXCAXNPXACTGC

SEQ ID NO: 8812 - protein, 17 aa, Artificial Sequence
  Synthetically generated peptide
  VARIANT (1)..(17): Xaa = Any Amino Acid
ACEYXCAXNPXXACTGC

SEQ ID NO: 8813 - protein, 17 aa, Artificial Sequence
  Synthetically generated peptide
  VARIANT (1)..(17): Xaa = Any Amino Acid
ACEYXCAXNPXAXCTGC

SEQ ID NO: 8814 - protein, 17 aa, Artificial Sequence
  Synthetically generated peptide
  VARIANT (1)..(17): Xaa = Any Amino Acid
ACEYXCAXNPXACXTGC

SEQ ID NO: 8815 - protein, 17 aa, Artificial Sequence
  Synthetically generated peptide
  VARIANT (1)..(17): Xaa = Any Amino Acid
ACEYXCAXNPXACTXGC

SEQ ID NO: 8816 - protein, 17 aa, Artificial Sequence
  Synthetically generated peptide
  VARIANT (1)..(17): Xaa = Any Amino Acid
ACEYXCAXNPXACTGXC

SEQ ID NO: 8817 - protein, 16 aa, Artificial Sequence
  Synthetically generated peptide
  VARIANT (1)..(16): Xaa = Any Amino Acid
ACEYXCAXNPAXCTGC

SEQ ID NO: 8818 - protein, 17 aa, Artificial Sequence
  Synthetically generated peptide
  VARIANT (1)..(17): Xaa = Any Amino Acid
ACEYXCAXNPAXXCTGC

SEQ ID NO: 8819 - protein, 17 aa, Artificial Sequence
  Synthetically generated peptide
  VARIANT (1)..(17): Xaa = Any Amino Acid
ACEYXCAXNPAXCXTGC

SEQ ID NO: 8820 - protein, 17 aa, Artificial Sequence
  Synthetically generated peptide
  VARIANT (1)..(17): Xaa = Any Amino Acid
ACEYXCAXNPAXCTXGC

SEQ ID NO: 8821 - protein, 17 aa, Artificial Sequence
  Synthetically generated peptide
  VARIANT (1)..(17): Xaa = Any Amino Acid
ACEYXCAXNPAXCTGXC

SEQ ID NO: 8822 - protein, 16 aa, Artificial Sequence
  Synthetically generated peptide
  VARIANT (1)..(16): Xaa = Any Amino Acid
ACEYXCAXNPACXTGC

SEQ ID NO: 8823 - protein, 17 aa, Artificial Sequence
  Synthetically generated peptide
  VARIANT (1)..(17): Xaa = Any Amino Acid
ACEYXCAXNPACXXTGC

SEQ ID NO: 8824 - protein, 17 aa, Artificial Sequence
  Synthetically generated peptide
  VARIANT (1)..(17): Xaa = Any Amino Acid
ACEYXCAXNPACXTXGC

SEQ ID NO: 8825 - protein, 17 aa, Artificial Sequence
  Synthetically generated peptide
  VARIANT (1)..(17): Xaa = Any Amino Acid
ACEYXCAXNPACXTGXC

SEQ ID NO: 8826 - protein, 16 aa, Artificial Sequence
  Synthetically generated peptide
  VARIANT (1)..(16): Xaa = Any Amino Acid
ACEYXCAXNPACTXGC

SEQ ID NO: 8827 - protein, 17 aa, Artificial Sequence
  Synthetically generated peptide
  VARIANT (1)..(17): Xaa = Any Amino Acid
ACEYXCAXNPACTXXGC

SEQ ID NO: 8828 - protein, 17 aa, Artificial Sequence
  Synthetically generated peptide
  VARIANT (1)..(17): Xaa = Any Amino Acid
ACEYXCAXNPACTXGXC

SEQ ID NO: 8829 - protein, 16 aa, Artificial Sequence
  Synthetically generated peptide
  VARIANT (1)..(16): Xaa = Any Amino Acid
ACEYXCAXNPACTGXC

SEQ ID NO: 8830 - protein, 17 aa, Artificial Sequence
  Synthetically generated peptide
  VARIANT (1)..(17): Xaa = Any Amino Acid
ACEYXCAXNPACTGXXC

SEQ ID NO: 8831 - protein, 15 aa, Artificial Sequence
  Synthetically generated peptide
  VARIANT (1)..(15): Xaa = Any Amino Acid
ACEYXCANXPACTGC

SEQ ID NO: 8832 - protein, 16 aa, Artificial Sequence
  Synthetically generated peptide
  VARIANT (1)..(16): Xaa = Any Amino Acid
ACEYXCANXXPACTGC

SEQ ID NO: 8833 - protein, 17 aa, Artificial Sequence
  Synthetically generated peptide
  VARIANT (1)..(17): Xaa = Any Amino Acid
ACEYXCANXXXPACTGC

SEQ ID NO: 8834 - protein, 17 aa, Artificial Sequence
  Synthetically generated peptide
  VARIANT (1)..(17): Xaa = Any Amino Acid
ACEYXCANXXPXACTGC

SEQ ID NO: 8835 - protein, 17 aa, Artificial Sequence
  Synthetically generated peptide
  VARIANT (1)..(17): Xaa = Any Amino Acid
ACEYXCANXXPAXCTGC

SEQ ID NO: 8836 - protein, 17 aa, Artificial Sequence
  Synthetically generated peptide
  VARIANT (1)..(17): Xaa = Any Amino Acid
ACEYXCANXXPACXTGC

SEQ ID NO: 8837 - protein, 17 aa, Artificial Sequence
  Synthetically generated peptide
  VARIANT (1)..(17): Xaa = Any Amino Acid
ACEYXCANXXPACTXGC

SEQ ID NO: 8838 - protein, 17 aa, Artificial Sequence
  Synthetically generated peptide
  VARIANT (1)..(17): Xaa = Any Amino Acid
ACEYXCANXXPACTGXC

SEQ ID NO: 8839 - protein, 16 aa, Artificial Sequence
  Synthetically generated peptide
  VARIANT (1)..(16): Xaa = Any Amino Acid
ACEYXCANXPXACTGC

SEQ ID NO: 8840 - protein, 17 aa, Artificial Sequence
  Synthetically generated peptide
  VARIANT (1)..(17): Xaa = Any Amino Acid
ACEYXCANXPXXACTGC

SEQ ID NO: 8841 - protein, 17 aa, Artificial Sequence
  Synthetically generated peptide
  VARIANT (1)..(17): Xaa = Any Amino Acid
ACEYXCANXPXAXCTGC

SEQ ID NO: 8842 - protein, 17 aa, Artificial Sequence
  Synthetically generated peptide
  VARIANT (1)..(17): Xaa = Any Amino Acid
ACEYXCANXPXACXTGC

SEQ ID NO: 8843 - protein, 17 aa, Artificial Sequence
  Synthetically generated peptide
  VARIANT (1)..(17): Xaa = Any Amino Acid
ACEYXCANXPXACTXGC

SEQ ID NO: 8844 - protein, 17 aa, Artificial Sequence
  Synthetically generated peptide
  VARIANT (1)..(17): Xaa = Any Amino Acid
ACEYXCANXPXACTGXC

SEQ ID NO: 8845 - protein, 16 aa, Artificial Sequence
  Synthetically generated peptide
  VARIANT (1)..(16): Xaa = Any Amino Acid
ACEYXCANXPAXCTGC

SEQ ID NO: 8846 - protein, 17 aa, Artificial Sequence
  Synthetically generated peptide
  VARIANT (1)..(17): Xaa = Any Amino Acid
ACEYXCANXPAXXCTGC

SEQ ID NO: 8847 - protein, 17 aa, Artificial Sequence
  Synthetically generated peptide
  VARIANT (1)..(17): Xaa = Any Amino Acid
ACEYXCANXPAXCXTGC

SEQ ID NO: 8848 - protein, 17 aa, Artificial Sequence
  Synthetically generated peptide
  VARIANT (1)..(17): Xaa = Any Amino Acid
ACEYXCANXPAXCTXGC

SEQ ID NO: 8849 - protein, 17 aa, Artificial Sequence
  Synthetically generated peptide
  VARIANT (1)..(17): Xaa = Any Amino Acid
ACEYXCANXPAXCTGXC

SEQ ID NO: 8850 - protein, 16 aa, Artificial Sequence
  Synthetically generated peptide
  VARIANT (1)..(16): Xaa = Any Amino Acid
ACEYXCANXPACXTGC

SEQ ID NO: 8851 - protein, 17 aa, Artificial Sequence
  Synthetically generated peptide
  VARIANT (1)..(17): Xaa = Any Amino Acid
ACEYXCANXPACXXTGC

SEQ ID NO: 8852 - protein, 17 aa, Artificial Sequence
  Synthetically generated peptide
  VARIANT (1)..(17): Xaa = Any Amino Acid
ACEYXCANXPACXTXGC

SEQ ID NO: 8853 - protein, 17 aa, Artificial Sequence
  Synthetically generated peptide
  VARIANT (1)..(17): Xaa = Any Amino Acid
ACEYXCANXPACXTGXC

SEQ ID NO: 8854 - protein, 16 aa, Artificial Sequence
  Synthetically generated peptide
  VARIANT (1)..(16): Xaa = Any Amino Acid
ACEYXCANXPACTXGC

SEQ ID NO: 8855 - protein, 17 aa, Artificial Sequence
  Synthetically generated peptide
  VARIANT (1)..(17): Xaa = Any Amino Acid
ACEYXCANXPACTXXGC

SEQ ID NO: 8856 - protein, 17 aa, Artificial Sequence
  Synthetically generated peptide
  VARIANT (1)..(17): Xaa = Any Amino Acid
ACEYXCANXPACTXGXC

SEQ ID NO: 8857 - protein, 16 aa, Artificial Sequence
  Synthetically generated peptide
  VARIANT (1)..(16): Xaa = Any Amino Acid
ACEYXCANXPACTGXC

SEQ ID NO: 8858 - protein, 17 aa, Artificial Sequence
  Synthetically generated peptide
  VARIANT (1)..(17): Xaa = Any Amino Acid
ACEYXCANXPACTGXXC

SEQ ID NO: 8859 - protein, 15 aa, Artificial Sequence
  Synthetically generated peptide
  VARIANT (1)..(15): Xaa = Any Amino Acid
ACEYXCANPXACTGC

SEQ ID NO: 8860 - protein, 16 aa, Artificial Sequence
  Synthetically generated peptide
  VARIANT (1)..(16): Xaa = Any Amino Acid
ACEYXCANPXXACTGC

SEQ ID NO: 8861 - protein, 17 aa, Artificial Sequence
  Synthetically generated peptide
  VARIANT (1)..(17): Xaa = Any Amino Acid
ACEYXCANPXXXACTGC

SEQ ID NO: 8862 - protein, 17 aa, Artificial Sequence
  Synthetically generated peptide
  VARIANT (1)..(17): Xaa = Any Amino Acid
ACEYXCANPXXAXCTGC

SEQ ID NO: 8863 - protein, 17 aa, Artificial Sequence
  Synthetically generated peptide
  VARIANT (1)..(17): Xaa = Any Amino Acid
ACEYXCANPXXACXTGC

SEQ ID NO: 8864 - protein, 17 aa, Artificial Sequence
  Synthetically generated peptide
  VARIANT (1)..(17): Xaa = Any Amino Acid
ACEYXCANPXXACTXGC

SEQ ID NO: 8865 - protein, 17 aa, Artificial Sequence
  Synthetically generated peptide
  VARIANT (1)..(17): Xaa = Any Amino Acid
ACEYXCANPXXACTGXC

SEQ ID NO: 8866 - protein, 16 aa, Artificial Sequence
  Synthetically generated peptide
  VARIANT (1)..(16): Xaa = Any Amino Acid
ACEYXCANPXAXCTGC

SEQ ID NO: 8867 - protein, 17 aa, Artificial Sequence
  Synthetically generated peptide
  VARIANT (1)..(17): Xaa = Any Amino Acid
ACEYXCANPXAXXCTGC

SEQ ID NO: 8868 - protein, 17 aa, Artificial Sequence
  Synthetically generated peptide
  VARIANT (1)..(17): Xaa = Any Amino Acid
ACEYXCANPXAXCXTGC

SEQ ID NO: 8869 - protein, 17 aa, Artificial Sequence
  Synthetically generated peptide
  VARIANT (1)..(17): Xaa = Any Amino Acid
ACEYXCANPXAXCTXGC

SEQ ID NO: 8870 - protein, 17 aa, Artificial Sequence
  Synthetically generated peptide
  VARIANT (1)..(17): Xaa = Any Amino Acid
ACEYXCANPXAXCTGXC

SEQ ID NO: 8871 - protein, 16 aa, Artificial Sequence
  Synthetically generated peptide
  VARIANT (1)..(16): Xaa = Any Amino Acid
ACEYXCANPXACXTGC

SEQ ID NO: 8872 - protein, 17 aa, Artificial Sequence
  Synthetically generated peptide
  VARIANT (1)..(17): Xaa = Any Amino Acid
ACEYXCANPXACXXTGC

SEQ ID NO: 8873 - protein, 17 aa, Artificial Sequence
  Synthetically generated peptide
  VARIANT (1)..(17): Xaa = Any Amino Acid
ACEYXCANPXACXTXGC

SEQ ID NO: 8874 - protein, 17 aa, Artificial Sequence
  Synthetically generated peptide
  VARIANT (1)..(17): Xaa = Any Amino Acid
ACEYXCANPXACXTGXC

SEQ ID NO: 8875 - protein, 16 aa, Artificial Sequence
  Synthetically generated peptide
  VARIANT (1)..(16): Xaa = Any Amino Acid
ACEYXCANPXACTXGC

SEQ ID NO: 8876 - protein, 17 aa, Artificial Sequence
  Synthetically generated peptide
  VARIANT (1)..(17): Xaa = Any Amino Acid
ACEYXCANPXACTXXGC

SEQ ID NO: 8877 - protein, 17 aa, Artificial Sequence
  Synthetically generated peptide
  VARIANT (1)..(17): Xaa = Any Amino Acid
ACEYXCANPXACTXGXC

SEQ ID NO: 8878 - protein, 16 aa, Artificial Sequence
  Synthetically generated peptide
  VARIANT (1)..(16): Xaa = Any Amino Acid
ACEYXCANPXACTGXC

SEQ ID NO: 8879 - protein, 17 aa, Artificial Sequence
  Synthetically generated peptide
  VARIANT (1)..(17): Xaa = Any Amino Acid
ACEYXCANPXACTGXXC

SEQ ID NO: 8880 - protein, 15 aa, Artificial Sequence
  Synthetically generated peptide
  VARIANT (1)..(15): Xaa = Any Amino Acid
ACEYXCANPAXCTGC

SEQ ID NO: 8881 - protein, 16 aa, Artificial Sequence
  Synthetically generated peptide
  VARIANT (1)..(16): Xaa = Any Amino Acid
ACEYXCANPAXXCTGC

SEQ ID NO: 8882 - protein, 17 aa, Artificial Sequence
  Synthetically generated peptide
  VARIANT (1)..(17): Xaa = Any Amino Acid
ACEYXCANPAXXXCTGC

SEQ ID NO: 8883 - protein, 17 aa, Artificial Sequence
  Synthetically generated peptide
  VARIANT (1)..(17): Xaa = Any Amino Acid
ACEYXCANPAXXCXTGC

SEQ ID NO: 8884 - protein, 17 aa, Artificial Sequence
  Synthetically generated peptide
  VARIANT (1)..(17): Xaa = Any Amino Acid
ACEYXCANPAXXCTXGC

SEQ ID NO: 8885 - protein, 17 aa, Artificial Sequence
  Synthetically generated peptide
  VARIANT (1)..(17): Xaa = Any Amino Acid
ACEYXCANPAXXCTGXC

SEQ ID NO: 8886 - protein, 16 aa, Artificial Sequence
  Synthetically generated peptide
  VARIANT (1)..(16): Xaa = Any Amino Acid
ACEYXCANPAXCXTGC

SEQ ID NO: 8887 - protein, 17 aa, Artificial Sequence
  Synthetically generated peptide
  VARIANT (1)..(17): Xaa = Any Amino Acid
ACEYXCANPAXCXXTGC

SEQ ID NO: 8888 - protein, 17 aa, Artificial Sequence
  Synthetically generated peptide
  VARIANT (1)..(17): Xaa = Any Amino Acid
ACEYXCANPAXCXTXGC

SEQ ID NO: 8889 - protein, 17 aa, Artificial Sequence
  Synthetically generated peptide
  VARIANT (1)..(17): Xaa = Any Amino Acid
ACEYXCANPAXCXTGXC

SEQ ID NO: 8890 - protein, 16 aa, Artificial Sequence
  Synthetically generated peptide
  VARIANT (1)..(16): Xaa = Any Amino Acid
ACEYXCANPAXCTXGC

SEQ ID NO: 8891 - protein, 17 aa, Artificial Sequence
  Synthetically generated peptide
  VARIANT (1)..(17): Xaa = Any Amino Acid
ACEYXCANPAXCTXXGC

SEQ ID NO: 8892 - protein, 17 aa, Artificial Sequence
  Synthetically generated peptide
  VARIANT (1)..(17): Xaa = Any Amino Acid
ACEYXCANPAXCTXGXC

SEQ ID NO: 8893 - protein, 16 aa, Artificial Sequence
  Synthetically generated peptide
  VARIANT (1)..(16): Xaa = Any Amino Acid
ACEYXCANPAXCTGXC

SEQ ID NO: 8894 - protein, 17 aa, Artificial Sequence
  Synthetically generated peptide
  VARIANT (1)..(17): Xaa = Any Amino Acid
ACEYXCANPAXCTGXXC

SEQ ID NO: 8895 - protein, 15 aa, Artificial Sequence
  Synthetically generated peptide
  VARIANT (1)..(15): Xaa = Any Amino Acid
ACEYXCANPACXTGC

SEQ ID NO: 8896 - protein, 16 aa, Artificial Sequence
  Synthetically generated peptide
  VARIANT (1)..(16): Xaa = Any Amino Acid
ACEYXCANPACXXTGC

SEQ ID NO: 8897 - protein, 17 aa, Artificial Sequence
  Synthetically generated peptide
  VARIANT (1)..(17): Xaa = Any Amino Acid
ACEYXCANPACXXXTGC

SEQ ID NO: 8898 - protein, 17 aa, Artificial Sequence
  Synthetically generated peptide
  VARIANT (1)..(17): Xaa = Any Amino Acid
ACEYXCANPACXXTXGC

SEQ ID NO: 8899 - protein, 17 aa, Artificial Sequence
  Synthetically generated peptide
  VARIANT (1)..(17): Xaa = Any Amino Acid
ACEYXCANPACXXTGXC

SEQ ID NO: 8900 - protein, 16 aa, Artificial Sequence
  Synthetically generated peptide
  VARIANT (1)..(16): Xaa = Any Amino Acid
ACEYXCANPACXTXGC

SEQ ID NO: 8901 - protein, 17 aa, Artificial Sequence
  Synthetically generated peptide
  VARIANT (1)..(17): Xaa = Any Amino Acid
ACEYXCANPACXTXXGC

SEQ ID NO: 8902 - protein, 17 aa, Artificial Sequence
  Synthetically generated peptide
  VARIANT (1)..(17): Xaa = Any Amino Acid
ACEYXCANPACXTXGXC

SEQ ID NO: 8903 - protein, 16 aa, Artificial Sequence
  Synthetically generated peptide
  VARIANT (1)..(16): Xaa = Any Amino Acid
ACEYXCANPACXTGXC

SEQ ID NO: 8904 - protein, 17 aa, Artificial Sequence
  Synthetically generated peptide
  VARIANT (1)..(17): Xaa = Any Amino Acid
ACEYXCANPACXTGXXC

SEQ ID NO: 8905 - protein, 15 aa, Artificial Sequence
  Synthetically generated peptide
  VARIANT (1)..(15): Xaa = Any Amino Acid
ACEYXCANPACTXGC

SEQ ID NO: 8906 - protein, 16 aa, Artificial Sequence
  Synthetically generated peptide
  VARIANT (1)..(16): Xaa = Any Amino Acid
ACEYXCANPACTXXGC

SEQ ID NO: 8907 - protein, 17 aa, Artificial Sequence
  Synthetically generated peptide
  VARIANT (1)..(17): Xaa = Any Amino Acid
ACEYXCANPACTXXXGC

SEQ ID NO: 8908 - protein, 17 aa, Artificial Sequence
  Synthetically generated peptide
  VARIANT (1)..(17): Xaa = Any Amino Acid
ACEYXCANPACTXXGXC

SEQ ID NO: 8909 - protein, 16 aa, Artificial Sequence
  Synthetically generated peptide
  VARIANT (1)..(16): Xaa = Any Amino Acid
ACEYXCANPACTXGXC

SEQ ID NO: 8910 - protein, 17 aa, Artificial Sequence
  Synthetically generated peptide
  VARIANT (1)..(17): Xaa = Any Amino Acid
ACEYXCANPACTXGXXC

SEQ ID NO: 8911 - protein, 15 aa, Artificial Sequence
  Synthetically generated peptide
  VARIANT (1)..(15): Xaa = Any Amino Acid
ACEYXCANPACTGXC

SEQ ID NO: 8912 - protein, 16 aa, Artificial Sequence
  Synthetically generated peptide
  VARIANT (1)..(16): Xaa = Any Amino Acid
ACEYXCANPACTGXXC

SEQ ID NO: 8913 - protein, 17 aa, Artificial Sequence
  Synthetically generated peptide
  VARIANT (1)..(17): Xaa = Any Amino Acid
ACEYXCANPACTGXXXC

SEQ ID NO: 8914 - protein, 14 aa, Artificial Sequence
  Synthetically generated peptide
  VARIANT (1)..(14): Xaa = Any Amino Acid
ACEYCAXNPACTGC

SEQ ID NO: 8915 - protein, 15 aa, Artificial Sequence
  Synthetically generated peptide
  VARIANT (1)..(15): Xaa = Any Amino Acid
ACEYCAXXNPACTGC

SEQ ID NO: 8916 - protein, 16 aa, Artificial Sequence
  Synthetically generated peptide
  VARIANT (1)..(16): Xaa = Any Amino Acid
ACEYCAXXXNPACTGC

SEQ ID NO: 8917 - protein, 17 aa, Artificial Sequence
  Synthetically generated peptide
  VARIANT (1)..(17): Xaa = Any Amino Acid
ACEYCAXXXXNPACTGC

SEQ ID NO: 8918 - protein, 17 aa, Artificial Sequence
  Synthetically generated peptide
  VARIANT (1)..(17): Xaa = Any Amino Acid
ACEYCAXXXNXPACTGC

SEQ ID NO: 8919 - protein, 17 aa, Artificial Sequence
  Synthetically generated peptide
  VARIANT (1)..(17): Xaa = Any Amino Acid
ACEYCAXXXNPXACTGC

SEQ ID NO: 8920 - protein, 17 aa, Artificial Sequence
  Synthetically generated peptide
  VARIANT (1)..(17): Xaa = Any Amino Acid
ACEYCAXXXNPAXCTGC

SEQ ID NO: 8921 - protein, 17 aa, Artificial Sequence
  Synthetically generated peptide
  VARIANT (1)..(17): Xaa = Any Amino Acid
ACEYCAXXXNPACXTGC

SEQ ID NO: 8922 - protein, 17 aa, Artificial Sequence
  Synthetically generated peptide
  VARIANT (1)..(17): Xaa = Any Amino Acid
ACEYCAXXXNPACTXGC

SEQ ID NO: 8923 - protein, 17 aa, Artificial Sequence
  Synthetically generated peptide
  VARIANT (1)..(17): Xaa = Any Amino Acid
ACEYCAXXXNPACTGXC

SEQ ID NO: 8924 - protein, 16 aa, Artificial Sequence
  Synthetically generated peptide
  VARIANT (1)..(16): Xaa = Any Amino Acid
ACEYCAXXNXPACTGC

SEQ ID NO: 8925 - protein, 17 aa, Artificial Sequence
  Synthetically generated peptide
  VARIANT (1)..(17): Xaa = Any Amino Acid
ACEYCAXXNXXPACTGC

SEQ ID NO: 8926 - protein, 17 aa, Artificial Sequence
  Synthetically generated peptide
  VARIANT (1)..(17): Xaa = Any Amino Acid
ACEYCAXXNXPXACTGC

SEQ ID NO: 8927 - protein, 17 aa, Artificial Sequence
  Synthetically generated peptide
  VARIANT (1)..(17): Xaa = Any Amino Acid
ACEYCAXXNXPAXCTGC

SEQ ID NO: 8928 - protein, 17 aa, Artificial Sequence
  Synthetically generated peptide
  VARIANT (1)..(17): Xaa = Any Amino Acid
ACEYCAXXNXPACXTGC

SEQ ID NO: 8929 - protein, 17 aa, Artificial Sequence
  Synthetically generated peptide
  VARIANT (1)..(17): Xaa = Any Amino Acid
ACEYCAXXNXPACTXGC

SEQ ID NO: 8930 - protein, 17 aa, Artificial Sequence
  Synthetically generated peptide
  VARIANT (1)..(17): Xaa = Any Amino Acid
ACEYCAXXNXPACTGXC

SEQ ID NO: 8931 - protein, 16 aa, Artificial Sequence
  Synthetically generated peptide
  VARIANT (1)..(16): Xaa = Any Amino Acid
ACEYCAXXNPXACTGC

SEQ ID NO: 8932 - protein, 17 aa, Artificial Sequence
  Synthetically generated peptide
  VARIANT (1)..(17): Xaa = Any Amino Acid
ACEYCAXXNPXXACTGC

SEQ ID NO: 8933 - protein, 17 aa, Artificial Sequence
  Synthetically generated peptide
  VARIANT (1)..(17): Xaa = Any Amino Acid
ACEYCAXXNPXAXCTGC

SEQ ID NO: 8934 - protein, 17 aa, Artificial Sequence
  Synthetically generated peptide
  VARIANT (1)..(17): Xaa = Any Amino Acid
ACEYCAXXNPXACXTGC

SEQ ID NO: 8935 - protein, 17 aa, Artificial Sequence
  Synthetically generated peptide
  VARIANT (1)..(17): Xaa = Any Amino Acid
ACEYCAXXNPXACTXGC

SEQ ID NO: 8936 - protein, 17 aa, Artificial Sequence
  Synthetically generated peptide
  VARIANT (1)..(17): Xaa = Any Amino Acid
ACEYCAXXNPXACTGXC

SEQ ID NO: 8937 - protein, 16 aa, Artificial Sequence
  Synthetically generated peptide
  VARIANT (1)..(16): Xaa = Any Amino Acid
ACEYCAXXNPAXCTGC

SEQ ID NO: 8938 - protein, 17 aa, Artificial Sequence
  Synthetically generated peptide
  VARIANT (1)..(17): Xaa = Any Amino Acid
ACEYCAXXNPAXXCTGC

SEQ ID NO: 8939 - protein, 17 aa, Artificial Sequence
  Synthetically generated peptide
  VARIANT (1)..(17): Xaa = Any Amino Acid
ACEYCAXXNPAXCXTGC

SEQ ID NO: 8940 - protein, 17 aa, Artificial Sequence
  Synthetically generated peptide
  VARIANT (1)..(17): Xaa = Any Amino Acid
ACEYCAXXNPAXCTXGC

SEQ ID NO: 8941 - protein, 17 aa, Artificial Sequence
  Synthetically generated peptide
  VARIANT (1)..(17): Xaa = Any Amino Acid
ACEYCAXXNPAXCTGXC

SEQ ID NO: 8942 - protein, 16 aa, Artificial Sequence
  Synthetically generated peptide
  VARIANT (1)..(16): Xaa = Any Amino Acid
ACEYCAXXNPACXTGC

SEQ ID NO: 8943 - protein, 17 aa, Artificial Sequence
  Synthetically generated peptide
  VARIANT (1)..(17): Xaa = Any Amino Acid
ACEYCAXXNPACXXTGC

SEQ ID NO: 8944 - protein, 17 aa, Artificial Sequence
  Synthetically generated peptide
  VARIANT (1)..(17): Xaa = Any Amino Acid
ACEYCAXXNPACXTXGC

SEQ ID NO: 8945 - protein, 17 aa, Artificial Sequence
  Synthetically generated peptide
  VARIANT (1)..(17): Xaa = Any Amino Acid
ACEYCAXXNPACXTGXC

SEQ ID NO: 8946 - protein, 16 aa, Artificial Sequence
  Synthetically generated peptide
  VARIANT (1)..(16): Xaa = Any Amino Acid
ACEYCAXXNPACTXGC

SEQ ID NO: 8947 - protein, 17 aa, Artificial Sequence
  Synthetically generated peptide
  VARIANT (1)..(17): Xaa = Any Amino Acid
ACEYCAXXNPACTXXGC

SEQ ID NO: 8948 - protein, 17 aa, Artificial Sequence
  Synthetically generated peptide
  VARIANT (1)..(17): Xaa = Any Amino Acid
ACEYCAXXNPACTXGXC

SEQ ID NO: 8949 - protein, 16 aa, Artificial Sequence
  Synthetically generated peptide
  VARIANT (1)..(16): Xaa = Any Amino Acid
ACEYCAXXNPACTGXC

SEQ ID NO: 8950 - protein, 17 aa, Artificial Sequence
  Synthetically generated peptide
  VARIANT (1)..(17): Xaa = Any Amino Acid
ACEYCAXXNPACTGXXC

SEQ ID NO: 8951 - protein, 15 aa, Artificial Sequence
  Synthetically generated peptide
  VARIANT (1)..(15): Xaa = Any Amino Acid
ACEYCAXNXPACTGC

SEQ ID NO: 8952 - protein, 16 aa, Artificial Sequence
  Synthetically generated peptide
  VARIANT (1)..(16): Xaa = Any Amino Acid
ACEYCAXNXXPACTGC

SEQ ID NO: 8953 - protein, 17 aa, Artificial Sequence
  Synthetically generated peptide
  VARIANT (1)..(17): Xaa = Any Amino Acid
ACEYCAXNXXXPACTGC

SEQ ID NO: 8954 - protein, 17 aa, Artificial Sequence
  Synthetically generated peptide
  VARIANT (1)..(17): Xaa = Any Amino Acid
ACEYCAXNXXPXACTGC

SEQ ID NO: 8955 - protein, 17 aa, Artificial Sequence
  Synthetically generated peptide
  VARIANT (1)..(17): Xaa = Any Amino Acid
ACEYCAXNXXPAXCTGC

SEQ ID NO: 8956 - protein, 17 aa, Artificial Sequence
  Synthetically generated peptide
  VARIANT (1)..(17): Xaa = Any Amino Acid
ACEYCAXNXXPACXTGC

SEQ ID NO: 8957 - protein, 17 aa, Artificial Sequence
  Synthetically generated peptide
  VARIANT (1)..(17): Xaa = Any Amino Acid
ACEYCAXNXXPACTXGC

SEQ ID NO: 8958 - protein, 17 aa, Artificial Sequence
  Synthetically generated peptide
  VARIANT (1)..(17): Xaa = Any Amino Acid
ACEYCAXNXXPACTGXC

SEQ ID NO: 8959 - protein, 16 aa, Artificial Sequence
  Synthetically generated peptide
  VARIANT (1)..(16): Xaa = Any Amino Acid
ACEYCAXNXPXACTGC

SEQ ID NO: 8960 - protein, 17 aa, Artificial Sequence
  Synthetically generated peptide
  VARIANT (1)..(17): Xaa = Any Amino Acid
ACEYCAXNXPXXACTGC

SEQ ID NO: 8961 - protein, 17 aa, Artificial Sequence
  Synthetically generated peptide
  VARIANT (1)..(17): Xaa = Any Amino Acid
ACEYCAXNXPXAXCTGC

SEQ ID NO: 8962 - protein, 17 aa, Artificial Sequence
  Synthetically generated peptide
  VARIANT (1)..(17): Xaa = Any Amino Acid
ACEYCAXNXPXACXTGC

SEQ ID NO: 8963 - protein, 17 aa, Artificial Sequence
  Synthetically generated peptide
  VARIANT (1)..(17): Xaa = Any Amino Acid
ACEYCAXNXPXACTXGC

SEQ ID NO: 8964 - protein, 17 aa, Artificial Sequence
  Synthetically generated peptide
  VARIANT (1)..(17): Xaa = Any Amino Acid
ACEYCAXNXPXACTGXC

SEQ ID NO: 8965 - protein, 16 aa, Artificial Sequence
  Synthetically generated peptide
  VARIANT (1)..(16): Xaa = Any Amino Acid
ACEYCAXNXPAXCTGC

SEQ ID NO: 8966 - protein, 17 aa, Artificial Sequence
  Synthetically generated peptide
  VARIANT (1)..(17): Xaa = Any Amino Acid
ACEYCAXNXPAXXCTGC

SEQ ID NO: 8967 - protein, 17 aa, Artificial Sequence
  Synthetically generated peptide
  VARIANT (1)..(17): Xaa = Any Amino Acid
ACEYCAXNXPAXCXTGC

SEQ ID NO: 8968 - protein, 17 aa, Artificial Sequence
  Synthetically generated peptide
  VARIANT (1)..(17): Xaa = Any Amino Acid
ACEYCAXNXPAXCTXGC

SEQ ID NO: 8969 - protein, 17 aa, Artificial Sequence
  Synthetically generated peptide
  VARIANT (1)..(17): Xaa = Any Amino Acid
ACEYCAXNXPAXCTGXC

SEQ ID NO: 8970 - protein, 16 aa, Artificial Sequence
  Synthetically generated peptide
  VARIANT (1)..(16): Xaa = Any Amino Acid
ACEYCAXNXPACXTGC

SEQ ID NO: 8971 - protein, 17 aa, Artificial Sequence
  Synthetically generated peptide
  VARIANT (1)..(17): Xaa = Any Amino Acid
ACEYCAXNXPACXXTGC

SEQ ID NO: 8972 - protein, 17 aa, Artificial Sequence
  Synthetically generated peptide
  VARIANT (1)..(17): Xaa = Any Amino Acid
ACEYCAXNXPACXTXGC

SEQ ID NO: 8973 - protein, 17 aa, Artificial Sequence
  Synthetically generated peptide
  VARIANT (1)..(17): Xaa = Any Amino Acid
ACEYCAXNXPACXTGXC

SEQ ID NO: 8974 - protein, 16 aa, Artificial Sequence
  Synthetically generated peptide
  VARIANT (1)..(16): Xaa = Any Amino Acid
ACEYCAXNXPACTXGC

SEQ ID NO: 8975 - protein, 17 aa, Artificial Sequence
  Synthetically generated peptide
  VARIANT (1)..(17): Xaa = Any Amino Acid
ACEYCAXNXPACTXXGC

SEQ ID NO: 8976 - protein, 17 aa, Artificial Sequence
  Synthetically generated peptide
  VARIANT (1)..(17): Xaa = Any Amino Acid
ACEYCAXNXPACTXGXC

SEQ ID NO: 8977 - protein, 16 aa, Artificial Sequence
  Synthetically generated peptide
  VARIANT (1)..(16): Xaa = Any Amino Acid
ACEYCAXNXPACTGXC

SEQ ID NO: 8978 - protein, 17 aa, Artificial Sequence
  Synthetically generated peptide
  VARIANT (1)..(17): Xaa = Any Amino Acid
ACEYCAXNXPACTGXXC

SEQ ID NO: 8979 - protein, 15 aa, Artificial Sequence
  Synthetically generated peptide
  VARIANT (1)..(15): Xaa = Any Amino Acid
ACEYCAXNPXACTGC

SEQ ID NO: 8980 - protein, 16 aa, Artificial Sequence
  Synthetically generated peptide
  VARIANT (1)..(16): Xaa = Any Amino Acid
ACEYCAXNPXXACTGC

SEQ ID NO: 8981 - protein, 17 aa, Artificial Sequence
  Synthetically generated peptide
  VARIANT (1)..(17): Xaa = Any Amino Acid
ACEYCAXNPXXXACTGC

SEQ ID NO: 8982 - protein, 17 aa, Artificial Sequence
  Synthetically generated peptide
  VARIANT (1)..(17): Xaa = Any Amino Acid
ACEYCAXNPXXAXCTGC

SEQ ID NO: 8983 - protein, 17 aa, Artificial Sequence
  Synthetically generated peptide
  VARIANT (1)..(17): Xaa = Any Amino Acid
ACEYCAXNPXXACXTGC

SEQ ID NO: 8984 - protein, 17 aa, Artificial Sequence
  Synthetically generated peptide
  VARIANT (1)..(17): Xaa = Any Amino Acid
ACEYCAXNPXXACTXGC

SEQ ID NO: 8985 - protein, 17 aa, Artificial Sequence
  Synthetically generated peptide
  VARIANT (1)..(17): Xaa = Any Amino Acid
ACEYCAXNPXXACTGXC

SEQ ID NO: 8986 - protein, 16 aa, Artificial Sequence
  Synthetically generated peptide
  VARIANT (1)..(16): Xaa = Any Amino Acid
ACEYCAXNPXAXCTGC

SEQ ID NO: 8987 - protein, 17 aa, Artificial Sequence
  Synthetically generated peptide
  VARIANT (1)..(17): Xaa = Any Amino Acid
ACEYCAXNPXAXXCTGC

SEQ ID NO: 8988 - protein, 17 aa, Artificial Sequence
  Synthetically generated peptide
  VARIANT (1)..(17): Xaa = Any Amino Acid
ACEYCAXNPXAXCXTGC

SEQ ID NO: 8989 - protein, 17 aa, Artificial Sequence
  Synthetically generated peptide
  VARIANT (1)..(17): Xaa = Any Amino Acid
ACEYCAXNPXAXCTXGC

SEQ ID NO: 8990 - protein, 17 aa, Artificial Sequence
  Synthetically generated peptide
  VARIANT (1)..(17): Xaa = Any Amino Acid
ACEYCAXNPXAXCTGXC

SEQ ID NO: 8991 - protein, 16 aa, Artificial Sequence
  Synthetically generated peptide
  VARIANT (1)..(16): Xaa = Any Amino Acid
ACEYCAXNPXACXTGC

SEQ ID NO: 8992 - protein, 17 aa, Artificial Sequence
  Synthetically generated peptide
  VARIANT (1)..(17): Xaa = Any Amino Acid
ACEYCAXNPXACXXTGC

SEQ ID NO: 8993 - protein, 17 aa, Artificial Sequence
  Synthetically generated peptide
  VARIANT (1)..(17): Xaa = Any Amino Acid
ACEYCAXNPXACXTXGC

SEQ ID NO: 8994 - protein, 17 aa, Artificial Sequence
  Synthetically generated peptide
  VARIANT (1)..(17): Xaa = Any Amino Acid
ACEYCAXNPXACXTGXC

SEQ ID NO: 8995 - protein, 16 aa, Artificial Sequence
  Synthetically generated peptide
  VARIANT (1)..(16): Xaa = Any Amino Acid
ACEYCAXNPXACTXGC

SEQ ID NO: 8996 - protein, 17 aa, Artificial Sequence
  Synthetically generated peptide
  VARIANT (1)..(17): Xaa = Any Amino Acid
ACEYCAXNPXACTXXGC

SEQ ID NO: 8997 - protein, 17 aa, Artificial Sequence
  Synthetically generated peptide
  VARIANT (1)..(17): Xaa = Any Amino Acid
ACEYCAXNPXACTXGXC

SEQ ID NO: 8998 - protein, 16 aa, Artificial Sequence
  Synthetically generated peptide
  VARIANT (1)..(16): Xaa = Any Amino Acid
ACEYCAXNPXACTGXC

SEQ ID NO: 8999 - protein, 17 aa, Artificial Sequence
  Synthetically generated peptide
  VARIANT (1)..(17): Xaa = Any Amino Acid
ACEYCAXNPXACTGXXC

SEQ ID NO: 9000 - protein, 15 aa, Artificial Sequence
  Synthetically generated peptide
  VARIANT (1)..(15): Xaa = Any Amino Acid
ACEYCAXNPAXCTGC

SEQ ID NO: 9001 - protein, 16 aa, Artificial Sequence
  Synthetically generated peptide
  VARIANT (1)..(16): Xaa = Any Amino Acid
ACEYCAXNPAXXCTGC

SEQ ID NO: 9002 - protein, 17 aa, Artificial Sequence
  Synthetically generated peptide
  VARIANT (1)..(17): Xaa = Any Amino Acid
ACEYCAXNPAXXXCTGC

SEQ ID NO: 9003 - protein, 17 aa, Artificial Sequence
  Synthetically generated peptide
  VARIANT (1)..(17): Xaa = Any Amino Acid
ACEYCAXNPAXXCXTGC

SEQ ID NO: 9004 - protein, 17 aa, Artificial Sequence
  Synthetically generated peptide
  VARIANT (1)..(17): Xaa = Any Amino Acid
ACEYCAXNPAXXCTXGC

SEQ ID NO: 9005 - protein, 17 aa, Artificial Sequence
  Synthetically generated peptide
  VARIANT (1)..(17): Xaa = Any Amino Acid
ACEYCAXNPAXXCTGXC

SEQ ID NO: 9006 - protein, 16 aa, Artificial Sequence
  Synthetically generated peptide
  VARIANT (1)..(16): Xaa = Any Amino Acid
ACEYCAXNPAXCXTGC

SEQ ID NO: 9007 - protein, 17 aa, Artificial Sequence
  Synthetically generated peptide
  VARIANT (1)..(17): Xaa = Any Amino Acid
ACEYCAXNPAXCXXTGC

SEQ ID NO: 9008 - protein, 17 aa, Artificial Sequence
  Synthetically generated peptide
  VARIANT (1)..(17): Xaa = Any Amino Acid
ACEYCAXNPAXCXTXGC

SEQ ID NO: 9009 - protein, 17 aa, Artificial Sequence
  Synthetically generated peptide
  VARIANT (1)..(17): Xaa = Any Amino Acid
ACEYCAXNPAXCXTGXC

SEQ ID NO: 9010 - protein, 16 aa, Artificial Sequence
  Synthetically generated peptide
  VARIANT (1)..(16): Xaa = Any Amino Acid
ACEYCAXNPAXCTXGC

SEQ ID NO: 9011 - protein, 17 aa, Artificial Sequence
  Synthetically generated peptide
  VARIANT (1)..(17): Xaa = Any Amino Acid
ACEYCAXNPAXCTXXGC

SEQ ID NO: 9012 - protein, 17 aa, Artificial Sequence
  Synthetically generated peptide
  VARIANT (1)..(17): Xaa = Any Amino Acid
ACEYCAXNPAXCTXGXC

SEQ ID NO: 9013 - protein, 16 aa, Artificial Sequence
  Synthetically generated peptide
  VARIANT (1)..(16): Xaa = Any Amino Acid
ACEYCAXNPAXCTGXC

SEQ ID NO: 9014 - protein, 17 aa, Artificial Sequence
  Synthetically generated peptide
  VARIANT (1)..(17): Xaa = Any Amino Acid
ACEYCAXNPAXCTGXXC

SEQ ID NO: 9015 - protein, 15 aa, Artificial Sequence
  Synthetically generated peptide
  VARIANT (1)..(15): Xaa = Any Amino Acid
ACEYCAXNPACXTGC

SEQ ID NO: 9016 - protein, 16 aa, Artificial Sequence
  Synthetically generated peptide
  VARIANT (1)..(16): Xaa = Any Amino Acid
ACEYCAXNPACXXTGC

SEQ ID NO: 9017 - protein, 17 aa, Artificial Sequence
  Synthetically generated peptide
  VARIANT (1)..(17): Xaa = Any Amino Acid
ACEYCAXNPACXXXTGC

SEQ ID NO: 9018 - protein, 17 aa, Artificial Sequence
  Synthetically generated peptide
  VARIANT (1)..(17): Xaa = Any Amino Acid
ACEYCAXNPACXXTXGC

SEQ ID NO: 9019 - protein, 17 aa, Artificial Sequence
  Synthetically generated peptide
  VARIANT (1)..(17): Xaa = Any Amino Acid
ACEYCAXNPACXXTGXC

SEQ ID NO: 9020 - protein, 16 aa, Artificial Sequence
  Synthetically generated peptide
  VARIANT (1)..(16): Xaa = Any Amino Acid
ACEYCAXNPACXTXGC

SEQ ID NO: 9021 - protein, 17 aa, Artificial Sequence
  Synthetically generated peptide
  VARIANT (1)..(17): Xaa = Any Amino Acid
ACEYCAXNPACXTXXGC

SEQ ID NO: 9022 - protein, 17 aa, Artificial Sequence
  Synthetically generated peptide
  VARIANT (1)..(17): Xaa = Any Amino Acid
ACEYCAXNPACXTXGXC

SEQ ID NO: 9023 - protein, 16 aa, Artificial Sequence
  Synthetically generated peptide
  VARIANT (1)..(16): Xaa = Any Amino Acid
ACEYCAXNPACXTGXC

SEQ ID NO: 9024 - protein, 17 aa, Artificial Sequence
  Synthetically generated peptide
  VARIANT (1)..(17): Xaa = Any Amino Acid
ACEYCAXNPACXTGXXC

SEQ ID NO: 9025 - protein, 15 aa, Artificial Sequence
  Synthetically generated peptide
  VARIANT (1)..(15): Xaa = Any Amino Acid
ACEYCAXNPACTXGC

SEQ ID NO: 9026 - protein, 16 aa, Artificial Sequence
  Synthetically generated peptide
  VARIANT (1)..(16): Xaa = Any Amino Acid
ACEYCAXNPACTXXGC

SEQ ID NO: 9027 - protein, 17 aa, Artificial Sequence
  Synthetically generated peptide
  VARIANT (1)..(17): Xaa = Any Amino Acid
ACEYCAXNPACTXXXGC

SEQ ID NO: 9028 - protein, 17 aa, Artificial Sequence
  Synthetically generated peptide
  VARIANT (1)..(17): Xaa = Any Amino Acid
ACEYCAXNPACTXXGXC

SEQ ID NO: 9029 - protein, 16 aa, Artificial Sequence
  Synthetically generated peptide
  VARIANT (1)..(16): Xaa = Any Amino Acid
ACEYCAXNPACTXGXC

SEQ ID NO: 9030 - protein, 17 aa, Artificial Sequence
  Synthetically generated peptide
  VARIANT (1)..(17): Xaa = Any Amino Acid
ACEYCAXNPACTXGXXC

SEQ ID NO: 9031 - protein, 15 aa, Artificial Sequence
  Synthetically generated peptide
  VARIANT (1)..(15): Xaa = Any Amino Acid
ACEYCAXNPACTGXC

SEQ ID NO: 9032 - protein, 16 aa, Artificial Sequence
  Synthetically generated peptide
  VARIANT (1)..(16): Xaa = Any Amino Acid
ACEYCAXNPACTGXXC

SEQ ID NO: 9033 - protein, 17 aa, Artificial Sequence
  Synthetically generated peptide
  VARIANT (1)..(17): Xaa = Any Amino Acid
ACEYCAXNPACTGXXXC

SEQ ID NO: 9034 - protein, 14 aa, Artificial Sequence
  Synthetically generated peptide
  VARIANT (1)..(14): Xaa = Any Amino Acid
ACEYCANXPACTGC

SEQ ID NO: 9035 - protein, 15 aa, Artificial Sequence
  Synthetically generated peptide
  VARIANT (1)..(15): Xaa = Any Amino Acid
ACEYCANXXPACTGC

SEQ ID NO: 9036 - protein, 16 aa, Artificial Sequence
  Synthetically generated peptide
  VARIANT (1)..(16): Xaa = Any Amino Acid
ACEYCANXXXPACTGC

SEQ ID NO: 9037 - protein, 17 aa, Artificial Sequence
  Synthetically generated peptide
  VARIANT (1)..(17): Xaa = Any Amino Acid
ACEYCANXXXXPACTGC

SEQ ID NO: 9038 - protein, 17 aa, Artificial Sequence
  Synthetically generated peptide
  VARIANT (1)..(17): Xaa = Any Amino Acid
ACEYCANXXXPXACTGC

SEQ ID NO: 9039 - protein, 17 aa, Artificial Sequence
  Synthetically generated peptide
  VARIANT (1)..(17): Xaa = Any Amino Acid
ACEYCANXXXPAXCTGC

SEQ ID NO: 9040 - protein, 17 aa, Artificial Sequence
  Synthetically generated peptide
  VARIANT (1)..(17): Xaa = Any Amino Acid
ACEYCANXXXPACXTGC

SEQ ID NO: 9041 - protein, 17 aa, Artificial Sequence
  Synthetically generated peptide
  VARIANT (1)..(17): Xaa = Any Amino Acid
ACEYCANXXXPACTXGC

SEQ ID NO: 9042 - protein, 17 aa, Artificial Sequence
  Synthetically generated peptide
  VARIANT (1)..(17): Xaa = Any Amino Acid
ACEYCANXXXPACTGXC

SEQ ID NO: 9043 - protein, 16 aa, Artificial Sequence
  Synthetically generated peptide
  VARIANT (1)..(16): Xaa = Any Amino Acid
ACEYCANXXPXACTGC

SEQ ID NO: 9044 - protein, 17 aa, Artificial Sequence
  Synthetically generated peptide
  VARIANT (1)..(17): Xaa = Any Amino Acid
ACEYCANXXPXXACTGC

SEQ ID NO: 9045 - protein, 17 aa, Artificial Sequence
  Synthetically generated peptide
  VARIANT (1)..(17): Xaa = Any Amino Acid
ACEYCANXXPXAXCTGC

SEQ ID NO: 9046 - protein, 17 aa, Artificial Sequence
  Synthetically generated peptide
  VARIANT (1)..(17): Xaa = Any Amino Acid
ACEYCANXXPXACXTGC

SEQ ID NO: 9047 - protein, 17 aa, Artificial Sequence
  Synthetically generated peptide
  VARIANT (1)..(17): Xaa = Any Amino Acid
ACEYCANXXPXACTXGC

SEQ ID NO: 9048 - protein, 17 aa, Artificial Sequence
  Synthetically generated peptide
  VARIANT (1)..(17): Xaa = Any Amino Acid
ACEYCANXXPXACTGXC

SEQ ID NO: 9049 - protein, 16 aa, Artificial Sequence
  Synthetically generated peptide
  VARIANT (1)..(16): Xaa = Any Amino Acid
ACEYCANXXPAXCTGC

SEQ ID NO: 9050 - protein, 17 aa, Artificial Sequence
  Synthetically generated peptide
  VARIANT (1)..(17): Xaa = Any Amino Acid
ACEYCANXXPAXXCTGC

SEQ ID NO: 9051 - protein, 17 aa, Artificial Sequence
  Synthetically generated peptide
  VARIANT (1)..(17): Xaa = Any Amino Acid
ACEYCANXXPAXCXTGC

SEQ ID NO: 9052 - protein, 17 aa, Artificial Sequence
  Synthetically generated peptide
  VARIANT (1)..(17): Xaa = Any Amino Acid
ACEYCANXXPAXCTXGC

SEQ ID NO: 9053 - protein, 17 aa, Artificial Sequence
  Synthetically generated peptide
  VARIANT (1)..(17): Xaa = Any Amino Acid
ACEYCANXXPAXCTGXC

SEQ ID NO: 9054 - protein, 16 aa, Artificial Sequence
  Synthetically generated peptide
  VARIANT (1)..(16): Xaa = Any Amino Acid
ACEYCANXXPACXTGC

SEQ ID NO: 9055 - protein, 17 aa, Artificial Sequence
  Synthetically generated peptide
  VARIANT (1)..(17): Xaa = Any Amino Acid
ACEYCANXXPACXXTGC

SEQ ID NO: 9056 - protein, 17 aa, Artificial Sequence
  Synthetically generated peptide
  VARIANT (1)..(17): Xaa = Any Amino Acid
ACEYCANXXPACXTXGC

SEQ ID NO: 9057 - protein, 17 aa, Artificial Sequence
  Synthetically generated peptide
  VARIANT (1)..(17): Xaa = Any Amino Acid
ACEYCANXXPACXTGXC

SEQ ID NO: 9058 - protein, 16 aa, Artificial Sequence
  Synthetically generated peptide
  VARIANT (1)..(16): Xaa = Any Amino Acid
ACEYCANXXPACTXGC

SEQ ID NO: 9059 - protein, 17 aa, Artificial Sequence
  Synthetically generated peptide
  VARIANT (1)..(17): Xaa = Any Amino Acid
ACEYCANXXPACTXXGC

SEQ ID NO: 9060 - protein, 17 aa, Artificial Sequence
  Synthetically generated peptide
  VARIANT (1)..(17): Xaa = Any Amino Acid
ACEYCANXXPACTXGXC

SEQ ID NO: 9061 - protein, 16 aa, Artificial Sequence
  Synthetically generated peptide
  VARIANT (1)..(16): Xaa = Any Amino Acid
ACEYCANXXPACTGXC

SEQ ID NO: 9062 - protein, 17 aa, Artificial Sequence
  Synthetically generated peptide
  VARIANT (1)..(17): Xaa = Any Amino Acid
ACEYCANXXPACTGXXC

SEQ ID NO: 9063 - protein, 15 aa, Artificial Sequence
  Synthetically generated peptide
  VARIANT (1)..(15): Xaa = Any Amino Acid
ACEYCANXPXACTGC

SEQ ID NO: 9064 - protein, 16 aa, Artificial Sequence
  Synthetically generated peptide
  VARIANT (1)..(16): Xaa = Any Amino Acid
ACEYCANXPXXACTGC

SEQ ID NO: 9065 - protein, 17 aa, Artificial Sequence
  Synthetically generated peptide
  VARIANT (1)..(17): Xaa = Any Amino Acid
ACEYCANXPXXXACTGC

SEQ ID NO: 9066 - protein, 17 aa, Artificial Sequence
  Synthetically generated peptide
  VARIANT (1)..(17): Xaa = Any Amino Acid
ACEYCANXPXXAXCTGC

SEQ ID NO: 9067 - protein, 17 aa, Artificial Sequence
  Synthetically generated peptide
  VARIANT (1)..(17): Xaa = Any Amino Acid
ACEYCANXPXXACXTGC

SEQ ID NO: 9068 - protein, 17 aa, Artificial Sequence
  Synthetically generated peptide
  VARIANT (1)..(17): Xaa = Any Amino Acid
ACEYCANXPXXACTXGC

SEQ ID NO: 9069 - protein, 17 aa, Artificial Sequence
  Synthetically generated peptide
  VARIANT (1)..(17): Xaa = Any Amino Acid
ACEYCANXPXXACTGXC

SEQ ID NO: 9070 - protein, 16 aa, Artificial Sequence
  Synthetically generated peptide
  VARIANT (1)..(16): Xaa = Any Amino Acid
ACEYCANXPXAXCTGC

SEQ ID NO: 9071 - protein, 17 aa, Artificial Sequence
  Synthetically generated peptide
  VARIANT (1)..(17): Xaa = Any Amino Acid
ACEYCANXPXAXXCTGC

SEQ ID NO: 9072 - protein, 17 aa, Artificial Sequence
  Synthetically generated peptide
  VARIANT (1)..(17): Xaa = Any Amino Acid
ACEYCANXPXAXCXTGC

SEQ ID NO: 9073 - protein, 17 aa, Artificial Sequence
  Synthetically generated peptide
  VARIANT (1)..(17): Xaa = Any Amino Acid
ACEYCANXPXAXCTXGC

SEQ ID NO: 9074 - protein, 17 aa, Artificial Sequence
  Synthetically generated peptide
  VARIANT (1)..(17): Xaa = Any Amino Acid
ACEYCANXPXAXCTGXC

SEQ ID NO: 9075 - protein, 16 aa, Artificial Sequence
  Synthetically generated peptide
  VARIANT (1)..(16): Xaa = Any Amino Acid
ACEYCANXPXACXTGC

SEQ ID NO: 9076 - protein, 17 aa, Artificial Sequence
  Synthetically generated peptide
  VARIANT (1)..(17): Xaa = Any Amino Acid
ACEYCANXPXACXXTGC

SEQ ID NO: 9077 - protein, 17 aa, Artificial Sequence
  Synthetically generated peptide
  VARIANT (1)..(17): Xaa = Any Amino Acid
ACEYCANXPXACXTXGC

SEQ ID NO: 9078 - protein, 17 aa, Artificial Sequence
  Synthetically generated peptide
  VARIANT (1)..(17): Xaa = Any Amino Acid
ACEYCANXPXACXTGXC

SEQ ID NO: 9079 - protein, 16 aa, Artificial Sequence
  Synthetically generated peptide
  VARIANT (1)..(16): Xaa = Any Amino Acid
ACEYCANXPXACTXGC

SEQ ID NO: 9080 - protein, 17 aa, Artificial Sequence
  Synthetically generated peptide
  VARIANT (1)..(17): Xaa = Any Amino Acid
ACEYCANXPXACTXXGC

SEQ ID NO: 9081 - protein, 17 aa, Artificial Sequence
  Synthetically generated peptide
  VARIANT (1)..(17): Xaa = Any Amino Acid
ACEYCANXPXACTXGXC

SEQ ID NO: 9082 - protein, 16 aa, Artificial Sequence
  Synthetically generated peptide
  VARIANT (1)..(16): Xaa = Any Amino Acid
ACEYCANXPXACTGXC

SEQ ID NO: 9083 - protein, 17 aa, Artificial Sequence
  Synthetically generated peptide
  VARIANT (1)..(17): Xaa = Any Amino Acid
ACEYCANXPXACTGXXC

SEQ ID NO: 9084 - protein, 15 aa, Artificial Sequence
  Synthetically generated peptide
  VARIANT (1)..(15): Xaa = Any Amino Acid
ACEYCANXPAXCTGC

SEQ ID NO: 9085 - protein, 16 aa, Artificial Sequence
  Synthetically generated peptide
  VARIANT (1)..(16): Xaa = Any Amino Acid
ACEYCANXPAXXCTGC

SEQ ID NO: 9086 - protein, 17 aa, Artificial Sequence
  Synthetically generated peptide
  VARIANT (1)..(17): Xaa = Any Amino Acid
ACEYCANXPAXXXCTGC

SEQ ID NO: 9087 - protein, 17 aa, Artificial Sequence
  Synthetically generated peptide
  VARIANT (1)..(17): Xaa = Any Amino Acid
ACEYCANXPAXXCXTGC

SEQ ID NO: 9088 - protein, 17 aa, Artificial Sequence
  Synthetically generated peptide
  VARIANT (1)..(17): Xaa = Any Amino Acid
ACEYCANXPAXXCTXGC

SEQ ID NO: 9089 - protein, 17 aa, Artificial Sequence
  Synthetically generated peptide
  VARIANT (1)..(17): Xaa = Any Amino Acid
ACEYCANXPAXXCTGXC

SEQ ID NO: 9090 - protein, 16 aa, Artificial Sequence
  Synthetically generated peptide
  VARIANT (1)..(16): Xaa = Any Amino Acid
ACEYCANXPAXCXTGC

SEQ ID NO: 9091 - protein, 17 aa, Artificial Sequence
  Synthetically generated peptide
  VARIANT (1)..(17): Xaa = Any Amino Acid
ACEYCANXPAXCXXTGC

SEQ ID NO: 9092 - protein, 17 aa, Artificial Sequence
  Synthetically generated peptide
  VARIANT (1)..(17): Xaa = Any Amino Acid
ACEYCANXPAXCXTXGC

SEQ ID NO: 9093 - protein, 17 aa, Artificial Sequence
  Synthetically generated peptide
  VARIANT (1)..(17): Xaa = Any Amino Acid
ACEYCANXPAXCXTGXC

SEQ ID NO: 9094 - protein, 16 aa, Artificial Sequence
  Synthetically generated peptide
  VARIANT (1)..(16): Xaa = Any Amino Acid
ACEYCANXPAXCTXGC

SEQ ID NO: 9095 - protein, 17 aa, Artificial Sequence
  Synthetically generated peptide
  VARIANT (1)..(17): Xaa = Any Amino Acid
ACEYCANXPAXCTXXGC

SEQ ID NO: 9096 - protein, 17 aa, Artificial Sequence
  Synthetically generated peptide
  VARIANT (1)..(17): Xaa = Any Amino Acid
ACEYCANXPAXCTXGXC

SEQ ID NO: 9097 - protein, 16 aa, Artificial Sequence
  Synthetically generated peptide
  VARIANT (1)..(16): Xaa = Any Amino Acid
ACEYCANXPAXCTGXC

SEQ ID NO: 9098 - protein, 17 aa, Artificial Sequence
  Synthetically generated peptide
  VARIANT (1)..(17): Xaa = Any Amino Acid
ACEYCANXPAXCTGXXC

SEQ ID NO: 9099 - protein, 15 aa, Artificial Sequence
  Synthetically generated peptide
  VARIANT (1)..(15): Xaa = Any Amino Acid
ACEYCANXPACXTGC

SEQ ID NO: 9100 - protein, 16 aa, Artificial Sequence
  Synthetically generated peptide
  VARIANT (1)..(16): Xaa = Any Amino Acid
ACEYCANXPACXXTGC

SEQ ID NO: 9101 - protein, 17 aa, Artificial Sequence
  Synthetically generated peptide
  VARIANT (1)..(17): Xaa = Any Amino Acid
ACEYCANXPACXXXTGC

SEQ ID NO: 9102 - protein, 17 aa, Artificial Sequence
  Synthetically generated peptide
  VARIANT (1)..(17): Xaa = Any Amino Acid
ACEYCANXPACXXTXGC

SEQ ID NO: 9103 - protein, 17 aa, Artificial Sequence
  Synthetically generated peptide
  VARIANT (1)..(17): Xaa = Any Amino Acid
ACEYCANXPACXXTGXC

SEQ ID NO: 9104 - protein, 16 aa, Artificial Sequence
  Synthetically generated peptide
  VARIANT (1)..(16): Xaa = Any Amino Acid
ACEYCANXPACXTXGC

SEQ ID NO: 9105 - protein, 17 aa, Artificial Sequence
  Synthetically generated peptide
  VARIANT (1)..(17): Xaa = Any Amino Acid
ACEYCANXPACXTXXGC

SEQ ID NO: 9106 - protein, 17 aa, Artificial Sequence
  Synthetically generated peptide
  VARIANT (1)..(17): Xaa = Any Amino Acid
ACEYCANXPACXTXGXC

SEQ ID NO: 9107 - protein, 16 aa, Artificial Sequence
  Synthetically generated peptide
  VARIANT (1)..(16): Xaa = Any Amino Acid
ACEYCANXPACXTGXC

SEQ ID NO: 9108 - protein, 17 aa, Artificial Sequence
  Synthetically generated peptide
  VARIANT (1)..(17): Xaa = Any Amino Acid
ACEYCANXPACXTGXXC

SEQ ID NO: 9109 - protein, 15 aa, Artificial Sequence
  Synthetically generated peptide
  VARIANT (1)..(15): Xaa = Any Amino Acid
ACEYCANXPACTXGC

SEQ ID NO: 9110 - protein, 16 aa, Artificial Sequence
  Synthetically generated peptide
  VARIANT (1)..(16): Xaa = Any Amino Acid
ACEYCANXPACTXXGC

SEQ ID NO: 9111 - protein, 17 aa, Artificial Sequence
  Synthetically generated peptide
  VARIANT (1)..(17): Xaa = Any Amino Acid
ACEYCANXPACTXXXGC

SEQ ID NO: 9112 - protein, 17 aa, Artificial Sequence
  Synthetically generated peptide
  VARIANT (1)..(17): Xaa = Any Amino Acid
ACEYCANXPACTXXGXC

SEQ ID NO: 9113 - protein, 16 aa, Artificial Sequence
  Synthetically generated peptide
  VARIANT (1)..(16): Xaa = Any Amino Acid
ACEYCANXPACTXGXC

SEQ ID NO: 9114 - protein, 17 aa, Artificial Sequence
  Synthetically generated peptide
  VARIANT (1)..(17): Xaa = Any Amino Acid
ACEYCANXPACTXGXXC

SEQ ID NO: 9115 - protein, 15 aa, Artificial Sequence
  Synthetically generated peptide
  VARIANT (1)..(15): Xaa = Any Amino Acid
ACEYCANXPACTGXC

SEQ ID NO: 9116 - protein, 16 aa, Artificial Sequence
  Synthetically generated peptide
  VARIANT (1)..(16): Xaa = Any Amino Acid
ACEYCANXPACTGXXC

SEQ ID NO: 9117 - protein, 17 aa, Artificial Sequence
  Synthetically generated peptide
  VARIANT (1)..(17): Xaa = Any Amino Acid
ACEYCANXPACTGXXXC

SEQ ID NO: 9118 - protein, 14 aa, Artificial Sequence
  Synthetically generated peptide
  VARIANT (1)..(14): Xaa = Any Amino Acid
ACEYCANPXACTGC

SEQ ID NO: 9119 - protein, 15 aa, Artificial Sequence
  Synthetically generated peptide
  VARIANT (1)..(15): Xaa = Any Amino Acid
ACEYCANPXXACTGC

SEQ ID NO: 9120 - protein, 16 aa, Artificial Sequence
  Synthetically generated peptide
  VARIANT (1)..(16): Xaa = Any Amino Acid
ACEYCANPXXXACTGC

SEQ ID NO: 9121 - protein, 17 aa, Artificial Sequence
  Synthetically generated peptide
  VARIANT (1)..(17): Xaa = Any Amino Acid
ACEYCANPXXXXACTGC

SEQ ID NO: 9122 - protein, 17 aa, Artificial Sequence
  Synthetically generated peptide
  VARIANT (1)..(17): Xaa = Any Amino Acid
ACEYCANPXXXAXCTGC

SEQ ID NO: 9123 - protein, 17 aa, Artificial Sequence
  Synthetically generated peptide
  VARIANT (1)..(17): Xaa = Any Amino Acid
ACEYCANPXXXACXTGC

SEQ ID NO: 9124 - protein, 17 aa, Artificial Sequence
  Synthetically generated peptide
  VARIANT (1)..(17): Xaa = Any Amino Acid
ACEYCANPXXXACTXGC

SEQ ID NO: 9125 - protein, 17 aa, Artificial Sequence
  Synthetically generated peptide
  VARIANT (1)..(17): Xaa = Any Amino Acid
ACEYCANPXXXACTGXC

SEQ ID NO: 9126 - protein, 16 aa, Artificial Sequence
  Synthetically generated peptide
  VARIANT (1)..(16): Xaa = Any Amino Acid
ACEYCANPXXAXCTGC

SEQ ID NO: 9127 - protein, 17 aa, Artificial Sequence
  Synthetically generated peptide
  VARIANT (1)..(17): Xaa = Any Amino Acid
ACEYCANPXXAXXCTGC

SEQ ID NO: 9128 - protein, 17 aa, Artificial Sequence
  Synthetically generated peptide
  VARIANT (1)..(17): Xaa = Any Amino Acid
ACEYCANPXXAXCXTGC

SEQ ID NO: 9129 - protein, 17 aa, Artificial Sequence
  Synthetically generated peptide
  VARIANT (1)..(17): Xaa = Any Amino Acid
ACEYCANPXXAXCTXGC

SEQ ID NO: 9130 - protein, 17 aa, Artificial Sequence
  Synthetically generated peptide
  VARIANT (1)..(17): Xaa = Any Amino Acid
ACEYCANPXXAXCTGXC

SEQ ID NO: 9131 - protein, 16 aa, Artificial Sequence
  Synthetically generated peptide
  VARIANT (1)..(16): Xaa = Any Amino Acid
ACEYCANPXXACXTGC

SEQ ID NO: 9132 - protein, 17 aa, Artificial Sequence
  Synthetically generated peptide
  VARIANT (1)..(17): Xaa = Any Amino Acid
ACEYCANPXXACXXTGC

SEQ ID NO: 9133 - protein, 17 aa, Artificial Sequence
  Synthetically generated peptide
  VARIANT (1)..(17): Xaa = Any Amino Acid
ACEYCANPXXACXTXGC

SEQ ID NO: 9134 - protein, 17 aa, Artificial Sequence
  Synthetically generated peptide
  VARIANT (1)..(17): Xaa = Any Amino Acid
ACEYCANPXXACXTGXC

SEQ ID NO: 9135 - protein, 16 aa, Artificial Sequence
  Synthetically generated peptide
  VARIANT (1)..(16): Xaa = Any Amino Acid
ACEYCANPXXACTXGC

SEQ ID NO: 9136 - protein, 17 aa, Artificial Sequence
  Synthetically generated peptide
  VARIANT (1)..(17): Xaa = Any Amino Acid
ACEYCANPXXACTXXGC

SEQ ID NO: 9137 - protein, 17 aa, Artificial Sequence
  Synthetically generated peptide
  VARIANT (1)..(17): Xaa = Any Amino Acid
ACEYCANPXXACTXGXC

SEQ ID NO: 9138 - protein, 16 aa, Artificial Sequence
  Synthetically generated peptide
  VARIANT (1)..(16): Xaa = Any Amino Acid
ACEYCANPXXACTGXC

SEQ ID NO: 9139 - protein, 17 aa, Artificial Sequence
  Synthetically generated peptide
  VARIANT (1)..(17): Xaa = Any Amino Acid
ACEYCANPXXACTGXXC

SEQ ID NO: 9140 - protein, 15 aa, Artificial Sequence
  Synthetically generated peptide
  VARIANT (1)..(15): Xaa = Any Amino Acid
ACEYCANPXAXCTGC

SEQ ID NO: 9141 - protein, 16 aa, Artificial Sequence
  Synthetically generated peptide
  VARIANT (1)..(16): Xaa = Any Amino Acid
ACEYCANPXAXXCTGC

SEQ ID NO: 9142 - protein, 17 aa, Artificial Sequence
  Synthetically generated peptide
  VARIANT (1)..(17): Xaa = Any Amino Acid
ACEYCANPXAXXXCTGC

SEQ ID NO: 9143 - protein, 17 aa, Artificial Sequence
  Synthetically generated peptide
  VARIANT (1)..(17): Xaa = Any Amino Acid
ACEYCANPXAXXCXTGC

SEQ ID NO: 9144 - protein, 17 aa, Artificial Sequence
  Synthetically generated peptide
  VARIANT (1)..(17): Xaa = Any Amino Acid
ACEYCANPXAXXCTXGC

SEQ ID NO: 9145 - protein, 17 aa, Artificial Sequence
  Synthetically generated peptide
  VARIANT (1)..(17): Xaa = Any Amino Acid
ACEYCANPXAXXCTGXC

SEQ ID NO: 9146 - protein, 16 aa, Artificial Sequence
  Synthetically generated peptide
  VARIANT (1)..(16): Xaa = Any Amino Acid
ACEYCANPXAXCXTGC

SEQ ID NO: 9147 - protein, 17 aa, Artificial Sequence
  Synthetically generated peptide
  VARIANT (1)..(17): Xaa = Any Amino Acid
ACEYCANPXAXCXXTGC

SEQ ID NO: 9148 - protein, 17 aa, Artificial Sequence
  Synthetically generated peptide
  VARIANT (1)..(17): Xaa = Any Amino Acid
ACEYCANPXAXCXTXGC

SEQ ID NO: 9149 - protein, 17 aa, Artificial Sequence
  Synthetically generated peptide
  VARIANT (1)..(17): Xaa = Any Amino Acid
ACEYCANPXAXCXTGXC

SEQ ID NO: 9150 - protein, 16 aa, Artificial Sequence
  Synthetically generated peptide
  VARIANT (1)..(16): Xaa = Any Amino Acid
ACEYCANPXAXCTXGC

SEQ ID NO: 9151 - protein, 17 aa, Artificial Sequence
  Synthetically generated peptide
  VARIANT (1)..(17): Xaa = Any Amino Acid
ACEYCANPXAXCTXXGC

SEQ ID NO: 9152 - protein, 17 aa, Artificial Sequence
  Synthetically generated peptide
  VARIANT (1)..(17): Xaa = Any Amino Acid
ACEYCANPXAXCTXGXC

SEQ ID NO: 9153 - protein, 16 aa, Artificial Sequence
  Synthetically generated peptide
  VARIANT (1)..(16): Xaa = Any Amino Acid
ACEYCANPXAXCTGXC

SEQ ID NO: 9154 - protein, 17 aa, Artificial Sequence
  Synthetically generated peptide
  VARIANT (1)..(17): Xaa = Any Amino Acid
ACEYCANPXAXCTGXXC

SEQ ID NO: 9155 - protein, 15 aa, Artificial Sequence
  Synthetically generated peptide
  VARIANT (1)..(15): Xaa = Any Amino Acid
ACEYCANPXACXTGC

SEQ ID NO: 9156 - protein, 16 aa, Artificial Sequence
  Synthetically generated peptide
  VARIANT (1)..(16): Xaa = Any Amino Acid
ACEYCANPXACXXTGC

SEQ ID NO: 9157 - protein, 17 aa, Artificial Sequence
  Synthetically generated peptide
  VARIANT (1)..(17): Xaa = Any Amino Acid
ACEYCANPXACXXXTGC

SEQ ID NO: 9158 - protein, 17 aa, Artificial Sequence
  Synthetically generated peptide
  VARIANT (1)..(17): Xaa = Any Amino Acid
ACEYCANPXACXXTXGC

SEQ ID NO: 9159 - protein, 17 aa, Artificial Sequence
  Synthetically generated peptide
  VARIANT (1)..(17): Xaa = Any Amino Acid
ACEYCANPXACXXTGXC

SEQ ID NO: 9160 - protein, 16 aa, Artificial Sequence
  Synthetically generated peptide
  VARIANT (1)..(16): Xaa = Any Amino Acid
ACEYCANPXACXTXGC

SEQ ID NO: 9161 - protein, 17 aa, Artificial Sequence
  Synthetically generated peptide
  VARIANT (1)..(17): Xaa = Any Amino Acid
ACEYCANPXACXTXXGC

SEQ ID NO: 9162 - protein, 17 aa, Artificial Sequence
  Synthetically generated peptide
  VARIANT (1)..(17): Xaa = Any Amino Acid
ACEYCANPXACXTXGXC

SEQ ID NO: 9163 - protein, 16 aa, Artificial Sequence
  Synthetically generated peptide
  VARIANT (1)..(16): Xaa = Any Amino Acid
ACEYCANPXACXTGXC

SEQ ID NO: 9164 - protein, 17 aa, Artificial Sequence
  Synthetically generated peptide
  VARIANT (1)..(17): Xaa = Any Amino Acid
ACEYCANPXACXTGXXC

SEQ ID NO: 9165 - protein, 15 aa, Artificial Sequence
  Synthetically generated peptide
  VARIANT (1)..(15): Xaa = Any Amino Acid
ACEYCANPXACTXGC

SEQ ID NO: 9166 - protein, 16 aa, Artificial Sequence
  Synthetically generated peptide
  VARIANT (1)..(16): Xaa = Any Amino Acid
ACEYCANPXACTXXGC

SEQ ID NO: 9167 - protein, 17 aa, Artificial Sequence
  Synthetically generated peptide
  VARIANT (1)..(17): Xaa = Any Amino Acid
ACEYCANPXACTXXXGC

SEQ ID NO: 9168 - protein, 17 aa, Artificial Sequence
  Synthetically generated peptide
  VARIANT (1)..(17): Xaa = Any Amino Acid
ACEYCANPXACTXXGXC

SEQ ID NO: 9169 - protein, 16 aa, Artificial Sequence
  Synthetically generated peptide
  VARIANT (1)..(16): Xaa = Any Amino Acid
ACEYCANPXACTXGXC

SEQ ID NO: 9170 - protein, 17 aa, Artificial Sequence
  Synthetically generated peptide
  VARIANT (1)..(17): Xaa = Any Amino Acid
ACEYCANPXACTXGXXC

SEQ ID NO: 9171 - protein, 15 aa, Artificial Sequence
  Synthetically generated peptide
  VARIANT (1)..(15): Xaa = Any Amino Acid
ACEYCANPXACTGXC

SEQ ID NO: 9172 - protein, 16 aa, Artificial Sequence
  Synthetically generated peptide
  VARIANT (1)..(16): Xaa = Any Amino Acid
ACEYCANPXACTGXXC

SEQ ID NO: 9173 - protein, 17 aa, Artificial Sequence
  Synthetically generated peptide
  VARIANT (1)..(17): Xaa = Any Amino Acid
ACEYCANPXACTGXXXC

SEQ ID NO: 9174 - protein, 14 aa, Artificial Sequence
  Synthetically generated peptide
  VARIANT (1)..(14): Xaa = Any Amino Acid
ACEYCANPAXCTGC

SEQ ID NO: 9175 - protein, 15 aa, Artificial Sequence
  Synthetically generated peptide
  VARIANT (1)..(15): Xaa = Any Amino Acid
ACEYCANPAXXCTGC

SEQ ID NO: 9176 - protein, 16 aa, Artificial Sequence
  Synthetically generated peptide
  VARIANT (1)..(16): Xaa = Any Amino Acid
ACEYCANPAXXXCTGC

SEQ ID NO: 9177 - protein, 17 aa, Artificial Sequence
  Synthetically generated peptide
  VARIANT (1)..(17): Xaa = Any Amino Acid
ACEYCANPAXXXXCTGC

SEQ ID NO: 9178 - protein, 17 aa, Artificial Sequence
  Synthetically generated peptide
  VARIANT (1)..(17): Xaa = Any Amino Acid
ACEYCANPAXXXCXTGC

SEQ ID NO: 9179 - protein, 17 aa, Artificial Sequence
  Synthetically generated peptide
  VARIANT (1)..(17): Xaa = Any Amino Acid
ACEYCANPAXXXCTXGC

SEQ ID NO: 9180 - protein, 17 aa, Artificial Sequence
  Synthetically generated peptide
  VARIANT (1)..(17): Xaa = Any Amino Acid
ACEYCANPAXXXCTGXC

SEQ ID NO: 9181 - protein, 16 aa, Artificial Sequence
  Synthetically generated peptide
  VARIANT (1)..(16): Xaa = Any Amino Acid
ACEYCANPAXXCXTGC

SEQ ID NO: 9182 - protein, 17 aa, Artificial Sequence
  Synthetically generated peptide
  VARIANT (1)..(17): Xaa = Any Amino Acid
ACEYCANPAXXCXXTGC

SEQ ID NO: 9183 - protein, 17 aa, Artificial Sequence
  Synthetically generated peptide
  VARIANT (1)..(17): Xaa = Any Amino Acid
ACEYCANPAXXCXTXGC

SEQ ID NO: 9184 - protein, 17 aa, Artificial Sequence
  Synthetically generated peptide
  VARIANT (1)..(17): Xaa = Any Amino Acid
ACEYCANPAXXCXTGXC

SEQ ID NO: 9185 - protein, 16 aa, Artificial Sequence
  Synthetically generated peptide
  VARIANT (1)..(16): Xaa = Any Amino Acid
ACEYCANPAXXCTXGC

SEQ ID NO: 9186 - protein, 17 aa, Artificial Sequence
  Synthetically generated peptide
  VARIANT (1)..(17): Xaa = Any Amino Acid
ACEYCANPAXXCTXXGC

SEQ ID NO: 9187 - protein, 17 aa, Artificial Sequence
  Synthetically generated peptide
  VARIANT (1)..(17): Xaa = Any Amino Acid
ACEYCANPAXXCTXGXC

SEQ ID NO: 9188 - protein, 16 aa, Artificial Sequence
  Synthetically generated peptide
  VARIANT (1)..(16): Xaa = Any Amino Acid
ACEYCANPAXXCTGXC

SEQ ID NO: 9189 - protein, 17 aa, Artificial Sequence
  Synthetically generated peptide
  VARIANT (1)..(17): Xaa = Any Amino Acid
ACEYCANPAXXCTGXXC

SEQ ID NO: 9190 - protein, 15 aa, Artificial Sequence
  Synthetically generated peptide
  VARIANT (1)..(15): Xaa = Any Amino Acid
ACEYCANPAXCXTGC

SEQ ID NO: 9191 - protein, 16 aa, Artificial Sequence
  Synthetically generated peptide
  VARIANT (1)..(16): Xaa = Any Amino Acid
ACEYCANPAXCXXTGC

SEQ ID NO: 9192 - protein, 17 aa, Artificial Sequence
  Synthetically generated peptide
  VARIANT (1)..(17): Xaa = Any Amino Acid
ACEYCANPAXCXXXTGC

SEQ ID NO: 9193 - protein, 17 aa, Artificial Sequence
  Synthetically generated peptide
  VARIANT (1)..(17): Xaa = Any Amino Acid
ACEYCANPAXCXXTXGC

SEQ ID NO: 9194 - protein, 17 aa, Artificial Sequence
  Synthetically generated peptide
  VARIANT (1)..(17): Xaa = Any Amino Acid
ACEYCANPAXCXXTGXC

SEQ ID NO: 9195 - protein, 16 aa, Artificial Sequence
  Synthetically generated peptide
  VARIANT (1)..(16): Xaa = Any Amino Acid
ACEYCANPAXCXTXGC

SEQ ID NO: 9196 - protein, 17 aa, Artificial Sequence
  Synthetically generated peptide
  VARIANT (1)..(17): Xaa = Any Amino Acid
ACEYCANPAXCXTXXGC

SEQ ID NO: 9197 - protein, 17 aa, Artificial Sequence
  Synthetically generated peptide
  VARIANT (1)..(17): Xaa = Any Amino Acid
ACEYCANPAXCXTXGXC

SEQ ID NO: 9198 - protein, 16 aa, Artificial Sequence
  Synthetically generated peptide
  VARIANT (1)..(16): Xaa = Any Amino Acid
ACEYCANPAXCXTGXC

SEQ ID NO: 9199 - protein, 17 aa, Artificial Sequence
  Synthetically generated peptide
  VARIANT (1)..(17): Xaa = Any Amino Acid
ACEYCANPAXCXTGXXC

SEQ ID NO: 9200 - protein, 15 aa, Artificial Sequence
  Synthetically generated peptide
  VARIANT (1)..(15): Xaa = Any Amino Acid
ACEYCANPAXCTXGC

SEQ ID NO: 9201 - protein, 16 aa, Artificial Sequence
  Synthetically generated peptide
  VARIANT (1)..(16): Xaa = Any Amino Acid
ACEYCANPAXCTXXGC

SEQ ID NO: 9202 - protein, 17 aa, Artificial Sequence
  Synthetically generated peptide
  VARIANT (1)..(17): Xaa = Any Amino Acid
ACEYCANPAXCTXXXGC

SEQ ID NO: 9203 - protein, 17 aa, Artificial Sequence
  Synthetically generated peptide
  VARIANT (1)..(17): Xaa = Any Amino Acid
ACEYCANPAXCTXXGXC

SEQ ID NO: 9204 - protein, 16 aa, Artificial Sequence
  Synthetically generated peptide
  VARIANT (1)..(16): Xaa = Any Amino Acid
ACEYCANPAXCTXGXC

SEQ ID NO: 9205 - protein, 17 aa, Artificial Sequence
  Synthetically generated peptide
  VARIANT (1)..(17): Xaa = Any Amino Acid
ACEYCANPAXCTXGXXC

SEQ ID NO: 9206 - protein, 15 aa, Artificial Sequence
  Synthetically generated peptide
  VARIANT (1)..(15): Xaa = Any Amino Acid
ACEYCANPAXCTGXC

SEQ ID NO: 9207 - protein, 16 aa, Artificial Sequence
  Synthetically generated peptide
  VARIANT (1)..(16): Xaa = Any Amino Acid
ACEYCANPAXCTGXXC

SEQ ID NO: 9208 - protein, 17 aa, Artificial Sequence
  Synthetically generated peptide
  VARIANT (1)..(17): Xaa = Any Amino Acid
ACEYCANPAXCTGXXXC

SEQ ID NO: 9209 - protein, 14 aa, Artificial Sequence
  Synthetically generated peptide
  VARIANT (1)..(14): Xaa = Any Amino Acid
ACEYCANPACXTGC

SEQ ID NO: 9210 - protein, 15 aa, Artificial Sequence
  Synthetically generated peptide
  VARIANT (1)..(15): Xaa = Any Amino Acid
ACEYCANPACXXTGC

SEQ ID NO: 9211 - protein, 16 aa, Artificial Sequence
  Synthetically generated peptide
  VARIANT (1)..(16): Xaa = Any Amino Acid
ACEYCANPACXXXTGC

SEQ ID NO: 9212 - protein, 17 aa, Artificial Sequence
  Synthetically generated peptide
  VARIANT (1)..(17): Xaa = Any Amino Acid
ACEYCANPACXXXXTGC

SEQ ID NO: 9213 - protein, 17 aa, Artificial Sequence
  Synthetically generated peptide
  VARIANT (1)..(17): Xaa = Any Amino Acid
ACEYCANPACXXXTXGC

SEQ ID NO: 9214 - protein, 17 aa, Artificial Sequence
  Synthetically generated peptide
  VARIANT (1)..(17): Xaa = Any Amino Acid
ACEYCANPACXXXTGXC

SEQ ID NO: 9215 - protein, 16 aa, Artificial Sequence
  Synthetically generated peptide
  VARIANT (1)..(16): Xaa = Any Amino Acid
ACEYCANPACXXTXGC

SEQ ID NO: 9216 - protein, 17 aa, Artificial Sequence
  Synthetically generated peptide
  VARIANT (1)..(17): Xaa = Any Amino Acid
ACEYCANPACXXTXXGC

SEQ ID NO: 9217 - protein, 17 aa, Artificial Sequence
  Synthetically generated peptide
  VARIANT (1)..(17): Xaa = Any Amino Acid
ACEYCANPACXXTXGXC

SEQ ID NO: 9218 - protein, 16 aa, Artificial Sequence
  Synthetically generated peptide
  VARIANT (1)..(16): Xaa = Any Amino Acid
ACEYCANPACXXTGXC

SEQ ID NO: 9219 - protein, 17 aa, Artificial Sequence
  Synthetically generated peptide
  VARIANT (1)..(17): Xaa = Any Amino Acid
ACEYCANPACXXTGXXC

SEQ ID NO: 9220 - protein, 15 aa, Artificial Sequence
  Synthetically generated peptide
  VARIANT (1)..(15): Xaa = Any Amino Acid
ACEYCANPACXTXGC

SEQ ID NO: 9221 - protein, 16 aa, Artificial Sequence
  Synthetically generated peptide
  VARIANT (1)..(16): Xaa = Any Amino Acid
ACEYCANPACXTXXGC

SEQ ID NO: 9222 - protein, 17 aa, Artificial Sequence
  Synthetically generated peptide
  VARIANT (1)..(17): Xaa = Any Amino Acid
ACEYCANPACXTXXXGC

SEQ ID NO: 9223 - protein, 17 aa, Artificial Sequence
  Synthetically generated peptide
  VARIANT (1)..(17): Xaa = Any Amino Acid
ACEYCANPACXTXXGXC

SEQ ID NO: 9224 - protein, 16 aa, Artificial Sequence
  Synthetically generated peptide
  VARIANT (1)..(16): Xaa = Any Amino Acid
ACEYCANPACXTXGXC

SEQ ID NO: 9225 - protein, 17 aa, Artificial Sequence
  Synthetically generated peptide
  VARIANT (1)..(17): Xaa = Any Amino Acid
ACEYCANPACXTXGXXC

SEQ ID NO: 9226 - protein, 15 aa, Artificial Sequence
  Synthetically generated peptide
  VARIANT (1)..(15): Xaa = Any Amino Acid
ACEYCANPACXTGXC

SEQ ID NO: 9227 - protein, 16 aa, Artificial Sequence
  Synthetically generated peptide
  VARIANT (1)..(16): Xaa = Any Amino Acid
ACEYCANPACXTGXXC

SEQ ID NO: 9228 - protein, 17 aa, Artificial Sequence
  Synthetically generated peptide
  VARIANT (1)..(17): Xaa = Any Amino Acid
ACEYCANPACXTGXXXC

SEQ ID NO: 9229 - protein, 14 aa, Artificial Sequence
  Synthetically generated peptide
  VARIANT (1)..(14): Xaa = Any Amino Acid
ACEYCANPACTXGC

SEQ ID NO: 9230 - protein, 15 aa, Artificial Sequence
  Synthetically generated peptide
  VARIANT (1)..(15): Xaa = Any Amino Acid
ACEYCANPACTXXGC

SEQ ID NO: 9231 - protein, 16 aa, Artificial Sequence
  Synthetically generated peptide
  VARIANT (1)..(16): Xaa = Any Amino Acid
ACEYCANPACTXXXGC

SEQ ID NO: 9232 - protein, 17 aa, Artificial Sequence
  Synthetically generated peptide
  VARIANT (1)..(17): Xaa = Any Amino Acid
ACEYCANPACTXXXXGC

SEQ ID NO: 9233 - protein, 17 aa, Artificial Sequence
  Synthetically generated peptide
  VARIANT (1)..(17): Xaa = Any Amino Acid
ACEYCANPACTXXXGXC

SEQ ID NO: 9234 - protein, 16 aa, Artificial Sequence
  Synthetically generated peptide
  VARIANT (1)..(16): Xaa = Any Amino Acid
ACEYCANPACTXXGXC

SEQ ID NO: 9235 - protein, 17 aa, Artificial Sequence
  Synthetically generated peptide
  VARIANT (1)..(17): Xaa = Any Amino Acid
ACEYCANPACTXXGXXC

SEQ ID NO: 9236 - protein, 15 aa, Artificial Sequence
  Synthetically generated peptide
  VARIANT (1)..(15): Xaa = Any Amino Acid
ACEYCANPACTXGXC

SEQ ID NO: 9237 - protein, 16 aa, Artificial Sequence
  Synthetically generated peptide
  VARIANT (1)..(16): Xaa = Any Amino Acid
ACEYCANPACTXGXXC

SEQ ID NO: 9238 - protein, 17 aa, Artificial Sequence
  Synthetically generated peptide
  VARIANT (1)..(17): Xaa = Any Amino Acid
ACEYCANPACTXGXXXC

SEQ ID NO: 9239 - protein, 14 aa, Artificial Sequence
  Synthetically generated peptide
  VARIANT (1)..(14): Xaa = Any Amino Acid
ACEYCANPACTGXC

SEQ ID NO: 9240 - protein, 15 aa, Artificial Sequence
  Synthetically generated peptide
  VARIANT (1)..(15): Xaa = Any Amino Acid
ACEYCANPACTGXXC

SEQ ID NO: 9241 - protein, 16 aa, Artificial Sequence
  Synthetically generated peptide
  VARIANT (1)..(16): Xaa = Any Amino Acid
ACEYCANPACTGXXXC

SEQ ID NO: 9242 - protein, 17 aa, Artificial Sequence
  Synthetically generated peptide
  VARIANT (1)..(17): Xaa = Any Amino Acid
ACEYCANPACTGXXXXC

SEQ ID NO: 9243 - protein, 14 aa, Artificial Sequence
  Synthetically generated peptide
  VARIANT (1)..(14): Xaa = Any Amino Acid
CCXEYACNPACTGA

SEQ ID NO: 9244 - protein, 15 aa, Artificial Sequence
  Synthetically generated peptide
  VARIANT (1)..(15): Xaa = Any Amino Acid
CCXXEYACNPACTGA

SEQ ID NO: 9245 - protein, 16 aa, Artificial Sequence
  Synthetically generated peptide
  VARIANT (1)..(16): Xaa = Any Amino Acid
CCXXXEYACNPACTGA

SEQ ID NO: 9246 - protein, 17 aa, Artificial Sequence
  Synthetically generated peptide
  VARIANT (1)..(17): Xaa = Any Amino Acid
CCXXXXEYACNPACTGA

SEQ ID NO: 9247 - protein, 17 aa, Artificial Sequence
  Synthetically generated peptide
  VARIANT (1)..(17): Xaa = Any Amino Acid
CCXXXEXYACNPACTGA

SEQ ID NO: 9248 - protein, 17 aa, Artificial Sequence
  Synthetically generated peptide
  VARIANT (1)..(17): Xaa = Any Amino Acid
CCXXXEYXACNPACTGA

SEQ ID NO: 9249 - protein, 17 aa, Artificial Sequence
  Synthetically generated peptide
  VARIANT (1)..(17): Xaa = Any Amino Acid
CCXXXEYACXNPACTGA

SEQ ID NO: 9250 - protein, 17 aa, Artificial Sequence
  Synthetically generated peptide
  VARIANT (1)..(17): Xaa = Any Amino Acid
CCXXXEYACNXPACTGA

SEQ ID NO: 9251 - protein, 17 aa, Artificial Sequence
  Synthetically generated peptide
  VARIANT (1)..(17): Xaa = Any Amino Acid
CCXXXEYACNPXACTGA

SEQ ID NO: 9252 - protein, 17 aa, Artificial Sequence
  Synthetically generated peptide
  VARIANT (1)..(17): Xaa = Any Amino Acid
CCXXXEYACNPAXCTGA

SEQ ID NO: 9253 - protein, 17 aa, Artificial Sequence
  Synthetically generated peptide
  VARIANT (1)..(17): Xaa = Any Amino Acid
CCXXXEYACNPACXTGA

SEQ ID NO: 9254 - protein, 17 aa, Artificial Sequence
  Synthetically generated peptide
  VARIANT (1)..(17): Xaa = Any Amino Acid
CCXXXEYACNPACTXGA

SEQ ID NO: 9255 - protein, 17 aa, Artificial Sequence
  Synthetically generated peptide
  VARIANT (1)..(17): Xaa = Any Amino Acid
CCXXXEYACNPACTGXA

SEQ ID NO: 9256 - protein, 16 aa, Artificial Sequence
  Synthetically generated peptide
  VARIANT (1)..(16): Xaa = Any Amino Acid
CCXXEXYACNPACTGA

SEQ ID NO: 9257 - protein, 17 aa, Artificial Sequence
  Synthetically generated peptide
  VARIANT (1)..(17): Xaa = Any Amino Acid
CCXXEXXYACNPACTGA

SEQ ID NO: 9258 - protein, 17 aa, Artificial Sequence
  Synthetically generated peptide
  VARIANT (1)..(17): Xaa = Any Amino Acid
CCXXEXYXACNPACTGA

SEQ ID NO: 9259 - protein, 17 aa, Artificial Sequence
  Synthetically generated peptide
  VARIANT (1)..(17): Xaa = Any Amino Acid
CCXXEXYACXNPACTGA

SEQ ID NO: 9260 - protein, 17 aa, Artificial Sequence
  Synthetically generated peptide
  VARIANT (1)..(17): Xaa = Any Amino Acid
CCXXEXYACNXPACTGA

SEQ ID NO: 9261 - protein, 17 aa, Artificial Sequence
  Synthetically generated peptide
  VARIANT (1)..(17): Xaa = Any Amino Acid
CCXXEXYACNPXACTGA

SEQ ID NO: 9262 - protein, 17 aa, Artificial Sequence
  Synthetically generated peptide
  VARIANT (1)..(17): Xaa = Any Amino Acid
CCXXEXYACNPAXCTGA

SEQ ID NO: 9263 - protein, 17 aa, Artificial Sequence
  Synthetically generated peptide
  VARIANT (1)..(17): Xaa = Any Amino Acid
CCXXEXYACNPACXTGA

SEQ ID NO: 9264 - protein, 17 aa, Artificial Sequence
  Synthetically generated peptide
  VARIANT (1)..(17): Xaa = Any Amino Acid
CCXXEXYACNPACTXGA

SEQ ID NO: 9265 - protein, 17 aa, Artificial Sequence
  Synthetically generated peptide
  VARIANT (1)..(17): Xaa = Any Amino Acid
CCXXEXYACNPACTGXA

SEQ ID NO: 9266 - protein, 16 aa, Artificial Sequence
  Synthetically generated peptide
  VARIANT (1)..(16): Xaa = Any Amino Acid
CCXXEYXACNPACTGA

SEQ ID NO: 9267 - protein, 17 aa, Artificial Sequence
  Synthetically generated peptide
  VARIANT (1)..(17): Xaa = Any Amino Acid
CCXXEYXXACNPACTGA

SEQ ID NO: 9268 - protein, 17 aa, Artificial Sequence
  Synthetically generated peptide
  VARIANT (1)..(17): Xaa = Any Amino Acid
CCXXEYXACXNPACTGA

SEQ ID NO: 9269 - protein, 17 aa, Artificial Sequence
  Synthetically generated peptide
  VARIANT (1)..(17): Xaa = Any Amino Acid
CCXXEYXACNXPACTGA

SEQ ID NO: 9270 - protein, 17 aa, Artificial Sequence
  Synthetically generated peptide
  VARIANT (1)..(17): Xaa = Any Amino Acid
CCXXEYXACNPXACTGA

SEQ ID NO: 9271 - protein, 17 aa, Artificial Sequence
  Synthetically generated peptide
  VARIANT (1)..(17): Xaa = Any Amino Acid
CCXXEYXACNPAXCTGA

SEQ ID NO: 9272 - protein, 17 aa, Artificial Sequence
  Synthetically generated peptide
  VARIANT (1)..(17): Xaa = Any Amino Acid
CCXXEYXACNPACXTGA

SEQ ID NO: 9273 - protein, 17 aa, Artificial Sequence
  Synthetically generated peptide
  VARIANT (1)..(17): Xaa = Any Amino Acid
CCXXEYXACNPACTXGA

SEQ ID NO: 9274 - protein, 17 aa, Artificial Sequence
  Synthetically generated peptide
  VARIANT (1)..(17): Xaa = Any Amino Acid
CCXXEYXACNPACTGXA

SEQ ID NO: 9275 - protein, 16 aa, Artificial Sequence
  Synthetically generated peptide
  VARIANT (1)..(16): Xaa = Any Amino Acid
CCXXEYACXNPACTGA

SEQ ID NO: 9276 - protein, 17 aa, Artificial Sequence
  Synthetically generated peptide
  VARIANT (1)..(17): Xaa = Any Amino Acid
CCXXEYACXXNPACTGA

SEQ ID NO: 9277 - protein, 17 aa, Artificial Sequence
  Synthetically generated peptide
  VARIANT (1)..(17): Xaa = Any Amino Acid
CCXXEYACXNXPACTGA

SEQ ID NO: 9278 - protein, 17 aa, Artificial Sequence
  Synthetically generated peptide
  VARIANT (1)..(17): Xaa = Any Amino Acid
CCXXEYACXNPXACTGA

SEQ ID NO: 9279 - protein, 17 aa, Artificial Sequence
  Synthetically generated peptide
  VARIANT (1)..(17): Xaa = Any Amino Acid
CCXXEYACXNPAXCTGA

SEQ ID NO: 9280 - protein, 17 aa, Artificial Sequence
  Synthetically generated peptide
  VARIANT (1)..(17): Xaa = Any Amino Acid
CCXXEYACXNPACXTGA

SEQ ID NO: 9281 - protein, 17 aa, Artificial Sequence
  Synthetically generated peptide
  VARIANT (1)..(17): Xaa = Any Amino Acid
CCXXEYACXNPACTXGA

SEQ ID NO: 9282 - protein, 17 aa, Artificial Sequence
  Synthetically generated peptide
  VARIANT (1)..(17): Xaa = Any Amino Acid
CCXXEYACXNPACTGXA

SEQ ID NO: 9283 - protein, 16 aa, Artificial Sequence
  Synthetically generated peptide
  VARIANT (1)..(16): Xaa = Any Amino Acid
CCXXEYACNXPACTGA

SEQ ID NO: 9284 - protein, 17 aa, Artificial Sequence
  Synthetically generated peptide
  VARIANT (1)..(17): Xaa = Any Amino Acid
CCXXEYACNXXPACTGA

SEQ ID NO: 9285 - protein, 17 aa, Artificial Sequence
  Synthetically generated peptide
  VARIANT (1)..(17): Xaa = Any Amino Acid
CCXXEYACNXPXACTGA

SEQ ID NO: 9286 - protein, 17 aa, Artificial Sequence
  Synthetically generated peptide
  VARIANT (1)..(17): Xaa = Any Amino Acid
CCXXEYACNXPAXCTGA

SEQ ID NO: 9287 - protein, 17 aa, Artificial Sequence
  Synthetically generated peptide
  VARIANT (1)..(17): Xaa = Any Amino Acid
CCXXEYACNXPACXTGA

SEQ ID NO: 9288 - protein, 17 aa, Artificial Sequence
  Synthetically generated peptide
  VARIANT (1)..(17): Xaa = Any Amino Acid
CCXXEYACNXPACTXGA

SEQ ID NO: 9289 - protein, 17 aa, Artificial Sequence
  Synthetically generated peptide
  VARIANT (1)..(17): Xaa = Any Amino Acid
CCXXEYACNXPACTGXA

SEQ ID NO: 9290 - protein, 16 aa, Artificial Sequence
  Synthetically generated peptide
  VARIANT (1)..(16): Xaa = Any Amino Acid
CCXXEYACNPXACTGA

SEQ ID NO: 9291 - protein, 17 aa, Artificial Sequence
  Synthetically generated peptide
  VARIANT (1)..(17): Xaa = Any Amino Acid
CCXXEYACNPXXACTGA

SEQ ID NO: 9292 - protein, 17 aa, Artificial Sequence
  Synthetically generated peptide
  VARIANT (1)..(17): Xaa = Any Amino Acid
CCXXEYACNPXAXCTGA

SEQ ID NO: 9293 - protein, 17 aa, Artificial Sequence
  Synthetically generated peptide
  VARIANT (1)..(17): Xaa = Any Amino Acid
CCXXEYACNPXACXTGA

SEQ ID NO: 9294 - protein, 17 aa, Artificial Sequence
  Synthetically generated peptide
  VARIANT (1)..(17): Xaa = Any Amino Acid
CCXXEYACNPXACTXGA

SEQ ID NO: 9295 - protein, 17 aa, Artificial Sequence
  Synthetically generated peptide
  VARIANT (1)..(17): Xaa = Any Amino Acid
CCXXEYACNPXACTGXA

SEQ ID NO: 9296 - protein, 16 aa, Artificial Sequence
  Synthetically generated peptide
  VARIANT (1)..(16): Xaa = Any Amino Acid
CCXXEYACNPAXCTGA

SEQ ID NO: 9297 - protein, 17 aa, Artificial Sequence
  Synthetically generated peptide
  VARIANT (1)..(17): Xaa = Any Amino Acid
CCXXEYACNPAXXCTGA

SEQ ID NO: 9298 - protein, 17 aa, Artificial Sequence
  Synthetically generated peptide
  VARIANT (1)..(17): Xaa = Any Amino Acid
CCXXEYACNPAXCXTGA

SEQ ID NO: 9299 - protein, 17 aa, Artificial Sequence
  Synthetically generated peptide
  VARIANT (1)..(17): Xaa = Any Amino Acid
CCXXEYACNPAXCTXGA

SEQ ID NO: 9300 - protein, 17 aa, Artificial Sequence
  Synthetically generated peptide
  VARIANT (1)..(17): Xaa = Any Amino Acid
CCXXEYACNPAXCTGXA

SEQ ID NO: 9301 - protein, 16 aa, Artificial Sequence
  Synthetically generated peptide
  VARIANT (1)..(16): Xaa = Any Amino Acid
CCXXEYACNPACXTGA

SEQ ID NO: 9302 - protein, 17 aa, Artificial Sequence
  Synthetically generated peptide
  VARIANT (1)..(17): Xaa = Any Amino Acid
CCXXEYACNPACXXTGA

SEQ ID NO: 9303 - protein, 17 aa, Artificial Sequence
  Synthetically generated peptide
  VARIANT (1)..(17): Xaa = Any Amino Acid
CCXXEYACNPACXTXGA

SEQ ID NO: 9304 - protein, 17 aa, Artificial Sequence
  Synthetically generated peptide
  VARIANT (1)..(17): Xaa = Any Amino Acid
CCXXEYACNPACXTGXA

SEQ ID NO: 9305 - protein, 16 aa, Artificial Sequence
  Synthetically generated peptide
  VARIANT (1)..(16): Xaa = Any Amino Acid
CCXXEYACNPACTXGA

SEQ ID NO: 9306 - protein, 17 aa, Artificial Sequence
  Synthetically generated peptide
  VARIANT (1)..(17): Xaa = Any Amino Acid
CCXXEYACNPACTXXGA

SEQ ID NO: 9307 - protein, 17 aa, Artificial Sequence
  Synthetically generated peptide
  VARIANT (1)..(17): Xaa = Any Amino Acid
CCXXEYACNPACTXGXA

SEQ ID NO: 9308 - protein, 16 aa, Artificial Sequence
  Synthetically generated peptide
  VARIANT (1)..(16): Xaa = Any Amino Acid
CCXXEYACNPACTGXA

SEQ ID NO: 9309 - protein, 17 aa, Artificial Sequence
  Synthetically generated peptide
  VARIANT (1)..(17): Xaa = Any Amino Acid
CCXXEYACNPACTGXXA

SEQ ID NO: 9310 - protein, 15 aa, Artificial Sequence
  Synthetically generated peptide
  VARIANT (1)..(15): Xaa = Any Amino Acid
CCXEXYACNPACTGA

SEQ ID NO: 9311 - protein, 16 aa, Artificial Sequence
  Synthetically generated peptide
  VARIANT (1)..(16): Xaa = Any Amino Acid
CCXEXXYACNPACTGA

SEQ ID NO: 9312 - protein, 17 aa, Artificial Sequence
  Synthetically generated peptide
  VARIANT (1)..(17): Xaa = Any Amino Acid
CCXEXXXYACNPACTGA

SEQ ID NO: 9313 - protein, 17 aa, Artificial Sequence
  Synthetically generated peptide
  VARIANT (1)..(17): Xaa = Any Amino Acid
CCXEXXYXACNPACTGA

SEQ ID NO: 9314 - protein, 17 aa, Artificial Sequence
  Synthetically generated peptide
  VARIANT (1)..(17): Xaa = Any Amino Acid
CCXEXXYACXNPACTGA

SEQ ID NO: 9315 - protein, 17 aa, Artificial Sequence
  Synthetically generated peptide
  VARIANT (1)..(17): Xaa = Any Amino Acid
CCXEXXYACNXPACTGA

SEQ ID NO: 9316 - protein, 17 aa, Artificial Sequence
  Synthetically generated peptide
  VARIANT (1)..(17): Xaa = Any Amino Acid
CCXEXXYACNPXACTGA

SEQ ID NO: 9317 - protein, 17 aa, Artificial Sequence
  Synthetically generated peptide
  VARIANT (1)..(17): Xaa = Any Amino Acid
CCXEXXYACNPAXCTGA

SEQ ID NO: 9318 - protein, 17 aa, Artificial Sequence
  Synthetically generated peptide
  VARIANT (1)..(17): Xaa = Any Amino Acid
CCXEXXYACNPACXTGA

SEQ ID NO: 9319 - protein, 17 aa, Artificial Sequence
  Synthetically generated peptide
  VARIANT (1)..(17): Xaa = Any Amino Acid
CCXEXXYACNPACTXGA

SEQ ID NO: 9320 - protein, 17 aa, Artificial Sequence
  Synthetically generated peptide
  VARIANT (1)..(17): Xaa = Any Amino Acid
CCXEXXYACNPACTGXA

SEQ ID NO: 9321 - protein, 16 aa, Artificial Sequence
  Synthetically generated peptide
  VARIANT (1)..(16): Xaa = Any Amino Acid
CCXEXYXACNPACTGA

SEQ ID NO: 9322 - protein, 17 aa, Artificial Sequence
  Synthetically generated peptide
  VARIANT (1)..(17): Xaa = Any Amino Acid
CCXEXYXXACNPACTGA

SEQ ID NO: 9323 - protein, 17 aa, Artificial Sequence
  Synthetically generated peptide
  VARIANT (1)..(17): Xaa = Any Amino Acid
CCXEXYXACXNPACTGA

SEQ ID NO: 9324 - protein, 17 aa, Artificial Sequence
  Synthetically generated peptide
  VARIANT (1)..(17): Xaa = Any Amino Acid
CCXEXYXACNXPACTGA

SEQ ID NO: 9325 - protein, 17 aa, Artificial Sequence
  Synthetically generated peptide
  VARIANT (1)..(17): Xaa = Any Amino Acid
CCXEXYXACNPXACTGA

SEQ ID NO: 9326 - protein, 17 aa, Artificial Sequence
  Synthetically generated peptide
  VARIANT (1)..(17): Xaa = Any Amino Acid
CCXEXYXACNPAXCTGA

SEQ ID NO: 9327 - protein, 17 aa, Artificial Sequence
  Synthetically generated peptide
  VARIANT (1)..(17): Xaa = Any Amino Acid
CCXEXYXACNPACXTGA

SEQ ID NO: 9328 - protein, 17 aa, Artificial Sequence
  Synthetically generated peptide
  VARIANT (1)..(17): Xaa = Any Amino Acid
CCXEXYXACNPACTXGA

SEQ ID NO: 9329 - protein, 17 aa, Artificial Sequence
  Synthetically generated peptide
  VARIANT (1)..(17): Xaa = Any Amino Acid
CCXEXYXACNPACTGXA

SEQ ID NO: 9330 - protein, 16 aa, Artificial Sequence
  Synthetically generated peptide
  VARIANT (1)..(16): Xaa = Any Amino Acid
CCXEXYACXNPACTGA

SEQ ID NO: 9331 - protein, 17 aa, Artificial Sequence
  Synthetically generated peptide
  VARIANT (1)..(17): Xaa = Any Amino Acid
CCXEXYACXXNPACTGA

SEQ ID NO: 9332 - protein, 17 aa, Artificial Sequence
  Synthetically generated peptide
  VARIANT (1)..(17): Xaa = Any Amino Acid
CCXEXYACXNXPACTGA

SEQ ID NO: 9333 - protein, 17 aa, Artificial Sequence
  Synthetically generated peptide
  VARIANT (1)..(17): Xaa = Any Amino Acid
CCXEXYACXNPXACTGA

SEQ ID NO: 9334 - protein, 17 aa, Artificial Sequence
  Synthetically generated peptide
  VARIANT (1)..(17): Xaa = Any Amino Acid
CCXEXYACXNPAXCTGA

SEQ ID NO: 9335 - protein, 17 aa, Artificial Sequence
  Synthetically generated peptide
  VARIANT (1)..(17): Xaa = Any Amino Acid
CCXEXYACXNPACXTGA

SEQ ID NO: 9336 - protein, 17 aa, Artificial Sequence
  Synthetically generated peptide
  VARIANT (1)..(17): Xaa = Any Amino Acid
CCXEXYACXNPACTXGA

SEQ ID NO: 9337 - protein, 17 aa, Artificial Sequence
  Synthetically generated peptide
  VARIANT (1)..(17): Xaa = Any Amino Acid
CCXEXYACXNPACTGXA

SEQ ID NO: 9338 - protein, 16 aa, Artificial Sequence
  Synthetically generated peptide
  VARIANT (1)..(16): Xaa = Any Amino Acid
CCXEXYACNXPACTGA

SEQ ID NO: 9339 - protein, 17 aa, Artificial Sequence
  Synthetically generated peptide
  VARIANT (1)..(17): Xaa = Any Amino Acid
CCXEXYACNXXPACTGA

SEQ ID NO: 9340 - protein, 17 aa, Artificial Sequence
  Synthetically generated peptide
  VARIANT (1)..(17): Xaa = Any Amino Acid
CCXEXYACNXPXACTGA

SEQ ID NO: 9341 - protein, 17 aa, Artificial Sequence
  Synthetically generated peptide
  VARIANT (1)..(17): Xaa = Any Amino Acid
CCXEXYACNXPAXCTGA

SEQ ID NO: 9342 - protein, 17 aa, Artificial Sequence
  Synthetically generated peptide
  VARIANT (1)..(17): Xaa = Any Amino Acid
CCXEXYACNXPACXTGA

SEQ ID NO: 9343 - protein, 17 aa, Artificial Sequence
  Synthetically generated peptide
  VARIANT (1)..(17): Xaa = Any Amino Acid
CCXEXYACNXPACTXGA

SEQ ID NO: 9344 - protein, 17 aa, Artificial Sequence
  Synthetically generated peptide
  VARIANT (1)..(17): Xaa = Any Amino Acid
CCXEXYACNXPACTGXA

SEQ ID NO: 9345 - protein, 16 aa, Artificial Sequence
  Synthetically generated peptide
  VARIANT (1)..(16): Xaa = Any Amino Acid
CCXEXYACNPXACTGA

SEQ ID NO: 9346 - protein, 17 aa, Artificial Sequence
  Synthetically generated peptide
  VARIANT (1)..(17): Xaa = Any Amino Acid
CCXEXYACNPXXACTGA

SEQ ID NO: 9347 - protein, 17 aa, Artificial Sequence
  Synthetically generated peptide
  VARIANT (1)..(17): Xaa = Any Amino Acid
CCXEXYACNPXAXCTGA

SEQ ID NO: 9348 - protein, 17 aa, Artificial Sequence
  Synthetically generated peptide
  VARIANT (1)..(17): Xaa = Any Amino Acid
CCXEXYACNPXACXTGA

SEQ ID NO: 9349 - protein, 17 aa, Artificial Sequence
  Synthetically generated peptide
  VARIANT (1)..(17): Xaa = Any Amino Acid
CCXEXYACNPXACTXGA

SEQ ID NO: 9350 - protein, 17 aa, Artificial Sequence
  Synthetically generated peptide
  VARIANT (1)..(17): Xaa = Any Amino Acid
CCXEXYACNPXACTGXA

SEQ ID NO: 9351 - protein, 16 aa, Artificial Sequence
  Synthetically generated peptide
  VARIANT (1)..(16): Xaa = Any Amino Acid
CCXEXYACNPAXCTGA

SEQ ID NO: 9352 - protein, 17 aa, Artificial Sequence
  Synthetically generated peptide
  VARIANT (1)..(17): Xaa = Any Amino Acid
CCXEXYACNPAXXCTGA

SEQ ID NO: 9353 - protein, 17 aa, Artificial Sequence
  Synthetically generated peptide
  VARIANT (1)..(17): Xaa = Any Amino Acid
CCXEXYACNPAXCXTGA

SEQ ID NO: 9354 - protein, 17 aa, Artificial Sequence
  Synthetically generated peptide
  VARIANT (1)..(17): Xaa = Any Amino Acid
CCXEXYACNPAXCTXGA

SEQ ID NO: 9355 - protein, 17 aa, Artificial Sequence
  Synthetically generated peptide
  VARIANT (1)..(17): Xaa = Any Amino Acid
CCXEXYACNPAXCTGXA

SEQ ID NO: 9356 - protein, 16 aa, Artificial Sequence
  Synthetically generated peptide
  VARIANT (1)..(16): Xaa = Any Amino Acid
CCXEXYACNPACXTGA

SEQ ID NO: 9357 - protein, 17 aa, Artificial Sequence
  Synthetically generated peptide
  VARIANT (1)..(17): Xaa = Any Amino Acid
CCXEXYACNPACXXTGA

SEQ ID NO: 9358 - protein, 17 aa, Artificial Sequence
  Synthetically generated peptide
  VARIANT (1)..(17): Xaa = Any Amino Acid
CCXEXYACNPACXTXGA

SEQ ID NO: 9359 - protein, 17 aa, Artificial Sequence
  Synthetically generated peptide
  VARIANT (1)..(17): Xaa = Any Amino Acid
CCXEXYACNPACXTGXA

SEQ ID NO: 9360 - protein, 16 aa, Artificial Sequence
  Synthetically generated peptide
  VARIANT (1)..(16): Xaa = Any Amino Acid
CCXEXYACNPACTXGA

SEQ ID NO: 9361 - protein, 17 aa, Artificial Sequence
  Synthetically generated peptide
  VARIANT (1)..(17): Xaa = Any Amino Acid
CCXEXYACNPACTXXGA

SEQ ID NO: 9362 - protein, 17 aa, Artificial Sequence
  Synthetically generated peptide
  VARIANT (1)..(17): Xaa = Any Amino Acid
CCXEXYACNPACTXGXA

SEQ ID NO: 9363 - protein, 16 aa, Artificial Sequence
  Synthetically generated peptide
  VARIANT (1)..(16): Xaa = Any Amino Acid
CCXEXYACNPACTGXA

SEQ ID NO: 9364 - protein, 17 aa, Artificial Sequence
  Synthetically generated peptide
  VARIANT (1)..(17): Xaa = Any Amino Acid
CCXEXYACNPACTGXXA

SEQ ID NO: 9365 - protein, 15 aa, Artificial Sequence
  Synthetically generated peptide
  VARIANT (1)..(15): Xaa = Any Amino Acid
CCXEYXACNPACTGA

SEQ ID NO: 9366 - protein, 16 aa, Artificial Sequence
  Synthetically generated peptide
  VARIANT (1)..(16): Xaa = Any Amino Acid
CCXEYXXACNPACTGA

SEQ ID NO: 9367 - protein, 17 aa, Artificial Sequence
  Synthetically generated peptide
  VARIANT (1)..(17): Xaa = Any Amino Acid
CCXEYXXXACNPACTGA

SEQ ID NO: 9368 - protein, 17 aa, Artificial Sequence
  Synthetically generated peptide
  VARIANT (1)..(17): Xaa = Any Amino Acid
CCXEYXXACXNPACTGA

SEQ ID NO: 9369 - protein, 17 aa, Artificial Sequence
  Synthetically generated peptide
  VARIANT (1)..(17): Xaa = Any Amino Acid
CCXEYXXACNXPACTGA

SEQ ID NO: 9370 - protein, 17 aa, Artificial Sequence
  Synthetically generated peptide
  VARIANT (1)..(17): Xaa = Any Amino Acid
CCXEYXXACNPXACTGA

SEQ ID NO: 9371 - protein, 17 aa, Artificial Sequence
  Synthetically generated peptide
  VARIANT (1)..(17): Xaa = Any Amino Acid
CCXEYXXACNPAXCTGA

SEQ ID NO: 9372 - protein, 17 aa, Artificial Sequence
  Synthetically generated peptide
  VARIANT (1)..(17): Xaa = Any Amino Acid
CCXEYXXACNPACXTGA

SEQ ID NO: 9373 - protein, 17 aa, Artificial Sequence
  Synthetically generated peptide
  VARIANT (1)..(17): Xaa = Any Amino Acid
CCXEYXXACNPACTXGA

SEQ ID NO: 9374 - protein, 17 aa, Artificial Sequence
  Synthetically generated peptide
  VARIANT (1)..(17): Xaa = Any Amino Acid
CCXEYXXACNPACTGXA

SEQ ID NO: 9375 - protein, 16 aa, Artificial Sequence
  Synthetically generated peptide
  VARIANT (1)..(16): Xaa = Any Amino Acid
CCXEYXACXNPACTGA

SEQ ID NO: 9376 - protein, 17 aa, Artificial Sequence
  Synthetically generated peptide
  VARIANT (1)..(17): Xaa = Any Amino Acid
CCXEYXACXXNPACTGA

SEQ ID NO: 9377 - protein, 17 aa, Artificial Sequence
  Synthetically generated peptide
  VARIANT (1)..(17): Xaa = Any Amino Acid
CCXEYXACXNXPACTGA

SEQ ID NO: 9378 - protein, 17 aa, Artificial Sequence
  Synthetically generated peptide
  VARIANT (1)..(17): Xaa = Any Amino Acid
CCXEYXACXNPXACTGA

SEQ ID NO: 9379 - protein, 17 aa, Artificial Sequence
  Synthetically generated peptide
  VARIANT (1)..(17): Xaa = Any Amino Acid
CCXEYXACXNPAXCTGA

SEQ ID NO: 9380 - protein, 17 aa, Artificial Sequence
  Synthetically generated peptide
  VARIANT (1)..(17): Xaa = Any Amino Acid
CCXEYXACXNPACXTGA

SEQ ID NO: 9381 - protein, 17 aa, Artificial Sequence
  Synthetically generated peptide
  VARIANT (1)..(17): Xaa = Any Amino Acid
CCXEYXACXNPACTXGA

SEQ ID NO: 9382 - protein, 17 aa, Artificial Sequence
  Synthetically generated peptide
  VARIANT (1)..(17): Xaa = Any Amino Acid
CCXEYXACXNPACTGXA

SEQ ID NO: 9383 - protein, 16 aa, Artificial Sequence
  Synthetically generated peptide
  VARIANT (1)..(16): Xaa = Any Amino Acid
CCXEYXACNXPACTGA

SEQ ID NO: 9384 - protein, 17 aa, Artificial Sequence
  Synthetically generated peptide
  VARIANT (1)..(17): Xaa = Any Amino Acid
CCXEYXACNXXPACTGA

SEQ ID NO: 9385 - protein, 17 aa, Artificial Sequence
  Synthetically generated peptide
  VARIANT (1)..(17): Xaa = Any Amino Acid
CCXEYXACNXPXACTGA

SEQ ID NO: 9386 - protein, 17 aa, Artificial Sequence
  Synthetically generated peptide
  VARIANT (1)..(17): Xaa = Any Amino Acid
CCXEYXACNXPAXCTGA

SEQ ID NO: 9387 - protein, 17 aa, Artificial Sequence
  Synthetically generated peptide
  VARIANT (1)..(17): Xaa = Any Amino Acid
CCXEYXACNXPACXTGA

SEQ ID NO: 9388 - protein, 17 aa, Artificial Sequence
  Synthetically generated peptide
  VARIANT (1)..(17): Xaa = Any Amino Acid
CCXEYXACNXPACTXGA

SEQ ID NO: 9389 - protein, 17 aa, Artificial Sequence
  Synthetically generated peptide
  VARIANT (1)..(17): Xaa = Any Amino Acid
CCXEYXACNXPACTGXA

SEQ ID NO: 9390 - protein, 16 aa, Artificial Sequence
  Synthetically generated peptide
  VARIANT (1)..(16): Xaa = Any Amino Acid
CCXEYXACNPXACTGA

SEQ ID NO: 9391 - protein, 17 aa, Artificial Sequence
  Synthetically generated peptide
  VARIANT (1)..(17): Xaa = Any Amino Acid
CCXEYXACNPXXACTGA

SEQ ID NO: 9392 - protein, 17 aa, Artificial Sequence
  Synthetically generated peptide
  VARIANT (1)..(17): Xaa = Any Amino Acid
CCXEYXACNPXAXCTGA

SEQ ID NO: 9393 - protein, 17 aa, Artificial Sequence
  Synthetically generated peptide
  VARIANT (1)..(17): Xaa = Any Amino Acid
CCXEYXACNPXACXTGA

SEQ ID NO: 9394 - protein, 17 aa, Artificial Sequence
  Synthetically generated peptide
  VARIANT (1)..(17): Xaa = Any Amino Acid
CCXEYXACNPXACTXGA

SEQ ID NO: 9395 - protein, 17 aa, Artificial Sequence
  Synthetically generated peptide
  VARIANT (1)..(17): Xaa = Any Amino Acid
CCXEYXACNPXACTGXA

SEQ ID NO: 9396 - protein, 16 aa, Artificial Sequence
  Synthetically generated peptide
  VARIANT (1)..(16): Xaa = Any Amino Acid
CCXEYXACNPAXCTGA

SEQ ID NO: 9397 - protein, 17 aa, Artificial Sequence
  Synthetically generated peptide
  VARIANT (1)..(17): Xaa = Any Amino Acid
CCXEYXACNPAXXCTGA

SEQ ID NO: 9398 - protein, 17 aa, Artificial Sequence
  Synthetically generated peptide
  VARIANT (1)..(17): Xaa = Any Amino Acid
CCXEYXACNPAXCXTGA

SEQ ID NO: 9399 - protein, 17 aa, Artificial Sequence
  Synthetically generated peptide
  VARIANT (1)..(17): Xaa = Any Amino Acid
CCXEYXACNPAXCTXGA

SEQ ID NO: 9400 - protein, 17 aa, Artificial Sequence
  Synthetically generated peptide
  VARIANT (1)..(17): Xaa = Any Amino Acid
CCXEYXACNPAXCTGXA

SEQ ID NO: 9401 - protein, 16 aa, Artificial Sequence
  Synthetically generated peptide
  VARIANT (1)..(16): Xaa = Any Amino Acid
CCXEYXACNPACXTGA

SEQ ID NO: 9402 - protein, 17 aa, Artificial Sequence
  Synthetically generated peptide
  VARIANT (1)..(17): Xaa = Any Amino Acid
CCXEYXACNPACXXTGA

SEQ ID NO: 9403 - protein, 17 aa, Artificial Sequence
  Synthetically generated peptide
  VARIANT (1)..(17): Xaa = Any Amino Acid
CCXEYXACNPACXTXGA

SEQ ID NO: 9404 - protein, 17 aa, Artificial Sequence
  Synthetically generated peptide
  VARIANT (1)..(17): Xaa = Any Amino Acid
CCXEYXACNPACXTGXA

SEQ ID NO: 9405 - protein, 16 aa, Artificial Sequence
  Synthetically generated peptide
  VARIANT (1)..(16): Xaa = Any Amino Acid
CCXEYXACNPACTXGA

SEQ ID NO: 9406 - protein, 17 aa, Artificial Sequence
  Synthetically generated peptide
  VARIANT (1)..(17): Xaa = Any Amino Acid
CCXEYXACNPACTXXGA

SEQ ID NO: 9407 - protein, 17 aa, Artificial Sequence
  Synthetically generated peptide
  VARIANT (1)..(17): Xaa = Any Amino Acid
CCXEYXACNPACTXGXA

SEQ ID NO: 9408 - protein, 16 aa, Artificial Sequence
  Synthetically generated peptide
  VARIANT (1)..(16): Xaa = Any Amino Acid
CCXEYXACNPACTGXA

SEQ ID NO: 9409 - protein, 17 aa, Artificial Sequence
  Synthetically generated peptide
  VARIANT (1)..(17): Xaa = Any Amino Acid
CCXEYXACNPACTGXXA

SEQ ID NO: 9410 - protein, 15 aa, Artificial Sequence
  Synthetically generated peptide
  VARIANT (1)..(15): Xaa = Any Amino Acid
CCXEYACXNPACTGA

SEQ ID NO: 9411 - protein, 16 aa, Artificial Sequence
  Synthetically generated peptide
  VARIANT (1)..(16): Xaa = Any Amino Acid
CCXEYACXXNPACTGA

SEQ ID NO: 9412 - protein, 17 aa, Artificial Sequence
  Synthetically generated peptide
  VARIANT (1)..(17): Xaa = Any Amino Acid
CCXEYACXXXNPACTGA

SEQ ID NO: 9413 - protein, 17 aa, Artificial Sequence
  Synthetically generated peptide
  VARIANT (1)..(17): Xaa = Any Amino Acid
CCXEYACXXNXPACTGA

SEQ ID NO: 9414 - protein, 17 aa, Artificial Sequence
  Synthetically generated peptide
  VARIANT (1)..(17): Xaa = Any Amino Acid
CCXEYACXXNPXACTGA

SEQ ID NO: 9415 - protein, 17 aa, Artificial Sequence
  Synthetically generated peptide
  VARIANT (1)..(17): Xaa = Any Amino Acid
CCXEYACXXNPAXCTGA

SEQ ID NO: 9416 - protein, 17 aa, Artificial Sequence
  Synthetically generated peptide
  VARIANT (1)..(17): Xaa = Any Amino Acid
CCXEYACXXNPACXTGA

SEQ ID NO: 9417 - protein, 17 aa, Artificial Sequence
  Synthetically generated peptide
  VARIANT (1)..(17): Xaa = Any Amino Acid
CCXEYACXXNPACTXGA

SEQ ID NO: 9418 - protein, 17 aa, Artificial Sequence
  Synthetically generated peptide
  VARIANT (1)..(17): Xaa = Any Amino Acid
CCXEYACXXNPACTGXA

SEQ ID NO: 9419 - protein, 16 aa, Artificial Sequence
  Synthetically generated peptide
  VARIANT (1)..(16): Xaa = Any Amino Acid
CCXEYACXNXPACTGA

SEQ ID NO: 9420 - protein, 17 aa, Artificial Sequence
  Synthetically generated peptide
  VARIANT (1)..(17): Xaa = Any Amino Acid
CCXEYACXNXXPACTGA

SEQ ID NO: 9421 - protein, 17 aa, Artificial Sequence
  Synthetically generated peptide
  VARIANT (1)..(17): Xaa = Any Amino Acid
CCXEYACXNXPXACTGA

SEQ ID NO: 9422 - protein, 17 aa, Artificial Sequence
  Synthetically generated peptide
  VARIANT (1)..(17): Xaa = Any Amino Acid
CCXEYACXNXPAXCTGA

SEQ ID NO: 9423 - protein, 17 aa, Artificial Sequence
  Synthetically generated peptide
  VARIANT (1)..(17): Xaa = Any Amino Acid
CCXEYACXNXPACXTGA

SEQ ID NO: 9424 - protein, 17 aa, Artificial Sequence
  Synthetically generated peptide
  VARIANT (1)..(17): Xaa = Any Amino Acid
CCXEYACXNXPACTXGA

SEQ ID NO: 9425 - protein, 17 aa, Artificial Sequence
  Synthetically generated peptide
  VARIANT (1)..(17): Xaa = Any Amino Acid
CCXEYACXNXPACTGXA

SEQ ID NO: 9426 - protein, 16 aa, Artificial Sequence
  Synthetically generated peptide
  VARIANT (1)..(16): Xaa = Any Amino Acid
CCXEYACXNPXACTGA

SEQ ID NO: 9427 - protein, 17 aa, Artificial Sequence
  Synthetically generated peptide
  VARIANT (1)..(17): Xaa = Any Amino Acid
CCXEYACXNPXXACTGA

SEQ ID NO: 9428 - protein, 17 aa, Artificial Sequence
  Synthetically generated peptide
  VARIANT (1)..(17): Xaa = Any Amino Acid
CCXEYACXNPXAXCTGA

SEQ ID NO: 9429 - protein, 17 aa, Artificial Sequence
  Synthetically generated peptide
  VARIANT (1)..(17): Xaa = Any Amino Acid
CCXEYACXNPXACXTGA

SEQ ID NO: 9430 - protein, 17 aa, Artificial Sequence
  Synthetically generated peptide
  VARIANT (1)..(17): Xaa = Any Amino Acid
CCXEYACXNPXACTXGA

SEQ ID NO: 9431 - protein, 17 aa, Artificial Sequence
  Synthetically generated peptide
  VARIANT (1)..(17): Xaa = Any Amino Acid
CCXEYACXNPXACTGXA

SEQ ID NO: 9432 - protein, 16 aa, Artificial Sequence
  Synthetically generated peptide
  VARIANT (1)..(16): Xaa = Any Amino Acid
CCXEYACXNPAXCTGA

SEQ ID NO: 9433 - protein, 17 aa, Artificial Sequence
  Synthetically generated peptide
  VARIANT (1)..(17): Xaa = Any Amino Acid
CCXEYACXNPAXXCTGA

SEQ ID NO: 9434 - protein, 17 aa, Artificial Sequence
  Synthetically generated peptide
  VARIANT (1)..(17): Xaa = Any Amino Acid
CCXEYACXNPAXCXTGA

SEQ ID NO: 9435 - protein, 17 aa, Artificial Sequence
  Synthetically generated peptide
  VARIANT (1)..(17): Xaa = Any Amino Acid
CCXEYACXNPAXCTXGA

SEQ ID NO: 9436 - protein, 17 aa, Artificial Sequence
  Synthetically generated peptide
  VARIANT (1)..(17): Xaa = Any Amino Acid
CCXEYACXNPAXCTGXA

SEQ ID NO: 9437 - protein, 16 aa, Artificial Sequence
  Synthetically generated peptide
  VARIANT (1)..(16): Xaa = Any Amino Acid
CCXEYACXNPACXTGA

SEQ ID NO: 9438 - protein, 17 aa, Artificial Sequence
  Synthetically generated peptide
  VARIANT (1)..(17): Xaa = Any Amino Acid
CCXEYACXNPACXXTGA

SEQ ID NO: 9439 - protein, 17 aa, Artificial Sequence
  Synthetically generated peptide
  VARIANT (1)..(17): Xaa = Any Amino Acid
CCXEYACXNPACXTXGA

SEQ ID NO: 9440 - protein, 17 aa, Artificial Sequence
  Synthetically generated peptide
  VARIANT (1)..(17): Xaa = Any Amino Acid
CCXEYACXNPACXTGXA

SEQ ID NO: 9441 - protein, 16 aa, Artificial Sequence
  Synthetically generated peptide
  VARIANT (1)..(16): Xaa = Any Amino Acid
CCXEYACXNPACTXGA

SEQ ID NO: 9442 - protein, 17 aa, Artificial Sequence
  Synthetically generated peptide
  VARIANT (1)..(17): Xaa = Any Amino Acid
CCXEYACXNPACTXXGA

SEQ ID NO: 9443 - protein, 17 aa, Artificial Sequence
  Synthetically generated peptide
  VARIANT (1)..(17): Xaa = Any Amino Acid
CCXEYACXNPACTXGXA

SEQ ID NO: 9444 - protein, 16 aa, Artificial Sequence
  Synthetically generated peptide
  VARIANT (1)..(16): Xaa = Any Amino Acid
CCXEYACXNPACTGXA

SEQ ID NO: 9445 - protein, 17 aa, Artificial Sequence
  Synthetically generated peptide
  VARIANT (1)..(17): Xaa = Any Amino Acid
CCXEYACXNPACTGXXA

SEQ ID NO: 9446 - protein, 15 aa, Artificial Sequence
  Synthetically generated peptide
  VARIANT (1)..(15): Xaa = Any Amino Acid
CCXEYACNXPACTGA

SEQ ID NO: 9447 - protein, 16 aa, Artificial Sequence
  Synthetically generated peptide
  VARIANT (1)..(16): Xaa = Any Amino Acid
CCXEYACNXXPACTGA

SEQ ID NO: 9448 - protein, 17 aa, Artificial Sequence
  Synthetically generated peptide
  VARIANT (1)..(17): Xaa = Any Amino Acid
CCXEYACNXXXPACTGA

SEQ ID NO: 9449 - protein, 17 aa, Artificial Sequence
  Synthetically generated peptide
  VARIANT (1)..(17): Xaa = Any Amino Acid
CCXEYACNXXPXACTGA

SEQ ID NO: 9450 - protein, 17 aa, Artificial Sequence
  Synthetically generated peptide
  VARIANT (1)..(17): Xaa = Any Amino Acid
CCXEYACNXXPAXCTGA

SEQ ID NO: 9451 - protein, 17 aa, Artificial Sequence
  Synthetically generated peptide
  VARIANT (1)..(17): Xaa = Any Amino Acid
CCXEYACNXXPACXTGA

SEQ ID NO: 9452 - protein, 17 aa, Artificial Sequence
  Synthetically generated peptide
  VARIANT (1)..(17): Xaa = Any Amino Acid
CCXEYACNXXPACTXGA

SEQ ID NO: 9453 - protein, 17 aa, Artificial Sequence
  Synthetically generated peptide
  VARIANT (1)..(17): Xaa = Any Amino Acid
CCXEYACNXXPACTGXA

SEQ ID NO: 9454 - protein, 16 aa, Artificial Sequence
  Synthetically generated peptide
  VARIANT (1)..(16): Xaa = Any Amino Acid
CCXEYACNXPXACTGA

SEQ ID NO: 9455 - protein, 17 aa, Artificial Sequence
  Synthetically generated peptide
  VARIANT (1)..(17): Xaa = Any Amino Acid
CCXEYACNXPXXACTGA

SEQ ID NO: 9456 - protein, 17 aa, Artificial Sequence
  Synthetically generated peptide
  VARIANT (1)..(17): Xaa = Any Amino Acid
CCXEYACNXPXAXCTGA

SEQ ID NO: 9457 - protein, 17 aa, Artificial Sequence
  Synthetically generated peptide
  VARIANT (1)..(17): Xaa = Any Amino Acid
CCXEYACNXPXACXTGA

SEQ ID NO: 9458 - protein, 17 aa, Artificial Sequence
  Synthetically generated peptide
  VARIANT (1)..(17): Xaa = Any Amino Acid
CCXEYACNXPXACTXGA

SEQ ID NO: 9459 - protein, 17 aa, Artificial Sequence
  Synthetically generated peptide
  VARIANT (1)..(17): Xaa = Any Amino Acid
CCXEYACNXPXACTGXA

SEQ ID NO: 9460 - protein, 16 aa, Artificial Sequence
  Synthetically generated peptide
  VARIANT (1)..(16): Xaa = Any Amino Acid
CCXEYACNXPAXCTGA

SEQ ID NO: 9461 - protein, 17 aa, Artificial Sequence
  Synthetically generated peptide
  VARIANT (1)..(17): Xaa = Any Amino Acid
CCXEYACNXPAXXCTGA

SEQ ID NO: 9462 - protein, 17 aa, Artificial Sequence
  Synthetically generated peptide
  VARIANT (1)..(17): Xaa = Any Amino Acid
CCXEYACNXPAXCXTGA

SEQ ID NO: 9463 - protein, 17 aa, Artificial Sequence
  Synthetically generated peptide
  VARIANT (1)..(17): Xaa = Any Amino Acid
CCXEYACNXPAXCTXGA

SEQ ID NO: 9464 - protein, 17 aa, Artificial Sequence
  Synthetically generated peptide
  VARIANT (1)..(17): Xaa = Any Amino Acid
CCXEYACNXPAXCTGXA

SEQ ID NO: 9465 - protein, 16 aa, Artificial Sequence
  Synthetically generated peptide
  VARIANT (1)..(16): Xaa = Any Amino Acid
CCXEYACNXPACXTGA

SEQ ID NO: 9466 - protein, 17 aa, Artificial Sequence
  Synthetically generated peptide
  VARIANT (1)..(17): Xaa = Any Amino Acid
CCXEYACNXPACXXTGA

SEQ ID NO: 9467 - protein, 17 aa, Artificial Sequence
  Synthetically generated peptide
  VARIANT (1)..(17): Xaa = Any Amino Acid
CCXEYACNXPACXTXGA

SEQ ID NO: 9468 - protein, 17 aa, Artificial Sequence
  Synthetically generated peptide
  VARIANT (1)..(17): Xaa = Any Amino Acid
CCXEYACNXPACXTGXA

SEQ ID NO: 9469 - protein, 16 aa, Artificial Sequence
  Synthetically generated peptide
  VARIANT (1)..(16): Xaa = Any Amino Acid
CCXEYACNXPACTXGA

SEQ ID NO: 9470 - protein, 17 aa, Artificial Sequence
  Synthetically generated peptide
  VARIANT (1)..(17): Xaa = Any Amino Acid
CCXEYACNXPACTXXGA

SEQ ID NO: 9471 - protein, 17 aa, Artificial Sequence
  Synthetically generated peptide
  VARIANT (1)..(17): Xaa = Any Amino Acid
CCXEYACNXPACTXGXA

SEQ ID NO: 9472 - protein, 16 aa, Artificial Sequence
  Synthetically generated peptide
  VARIANT (1)..(16): Xaa = Any Amino Acid
CCXEYACNXPACTGXA

SEQ ID NO: 9473 - protein, 17 aa, Artificial Sequence
  Synthetically generated peptide
  VARIANT (1)..(17): Xaa = Any Amino Acid
CCXEYACNXPACTGXXA

SEQ ID NO: 9474 - protein, 15 aa, Artificial Sequence
  Synthetically generated peptide
  VARIANT (1)..(15): Xaa = Any Amino Acid
CCXEYACNPXACTGA

SEQ ID NO: 9475 - protein, 16 aa, Artificial Sequence
  Synthetically generated peptide
  VARIANT (1)..(16): Xaa = Any Amino Acid
CCXEYACNPXXACTGA

SEQ ID NO: 9476 - protein, 17 aa, Artificial Sequence
  Synthetically generated peptide
  VARIANT (1)..(17): Xaa = Any Amino Acid
CCXEYACNPXXXACTGA

SEQ ID NO: 9477 - protein, 17 aa, Artificial Sequence
  Synthetically generated peptide
  VARIANT (1)..(17): Xaa = Any Amino Acid
CCXEYACNPXXAXCTGA

SEQ ID NO: 9478 - protein, 17 aa, Artificial Sequence
  Synthetically generated peptide
  VARIANT (1)..(17): Xaa = Any Amino Acid
CCXEYACNPXXACXTGA

SEQ ID NO: 9479 - protein, 17 aa, Artificial Sequence
  Synthetically generated peptide
  VARIANT (1)..(17): Xaa = Any Amino Acid
CCXEYACNPXXACTXGA

SEQ ID NO: 9480 - protein, 17 aa, Artificial Sequence
  Synthetically generated peptide
  VARIANT (1)..(17): Xaa = Any Amino Acid
CCXEYACNPXXACTGXA

SEQ ID NO: 9481 - protein, 16 aa, Artificial Sequence
  Synthetically generated peptide
  VARIANT (1)..(16): Xaa = Any Amino Acid
CCXEYACNPXAXCTGA

SEQ ID NO: 9482 - protein, 17 aa, Artificial Sequence
  Synthetically generated peptide
  VARIANT (1)..(17): Xaa = Any Amino Acid
CCXEYACNPXAXXCTGA

SEQ ID NO: 9483 - protein, 17 aa, Artificial Sequence
  Synthetically generated peptide
  VARIANT (1)..(17): Xaa = Any Amino Acid
CCXEYACNPXAXCXTGA

SEQ ID NO: 9484 - protein, 17 aa, Artificial Sequence
  Synthetically generated peptide
  VARIANT (1)..(17): Xaa = Any Amino Acid
CCXEYACNPXAXCTXGA

SEQ ID NO: 9485 - protein, 17 aa, Artificial Sequence
  Synthetically generated peptide
  VARIANT (1)..(17): Xaa = Any Amino Acid
CCXEYACNPXAXCTGXA

SEQ ID NO: 9486 - protein, 16 aa, Artificial Sequence
  Synthetically generated peptide
  VARIANT (1)..(16): Xaa = Any Amino Acid
CCXEYACNPXACXTGA

SEQ ID NO: 9487 - protein, 17 aa, Artificial Sequence
  Synthetically generated peptide
  VARIANT (1)..(17): Xaa = Any Amino Acid
CCXEYACNPXACXXTGA

SEQ ID NO: 9488 - protein, 17 aa, Artificial Sequence
  Synthetically generated peptide
  VARIANT (1)..(17): Xaa = Any Amino Acid
CCXEYACNPXACXTXGA

SEQ ID NO: 9489 - protein, 17 aa, Artificial Sequence
  Synthetically generated peptide
  VARIANT (1)..(17): Xaa = Any Amino Acid
CCXEYACNPXACXTGXA

SEQ ID NO: 9490 - protein, 16 aa, Artificial Sequence
  Synthetically generated peptide
  VARIANT (1)..(16): Xaa = Any Amino Acid
CCXEYACNPXACTXGA

SEQ ID NO: 9491 - protein, 17 aa, Artificial Sequence
  Synthetically generated peptide
  VARIANT (1)..(17): Xaa = Any Amino Acid
CCXEYACNPXACTXXGA

SEQ ID NO: 9492 - protein, 17 aa, Artificial Sequence
  Synthetically generated peptide
  VARIANT (1)..(17): Xaa = Any Amino Acid
CCXEYACNPXACTXGXA

SEQ ID NO: 9493 - protein, 16 aa, Artificial Sequence
  Synthetically generated peptide
  VARIANT (1)..(16): Xaa = Any Amino Acid
CCXEYACNPXACTGXA

SEQ ID NO: 9494 - protein, 17 aa, Artificial Sequence
  Synthetically generated peptide
  VARIANT (1)..(17): Xaa = Any Amino Acid
CCXEYACNPXACTGXXA

SEQ ID NO: 9495 - protein, 15 aa, Artificial Sequence
  Synthetically generated peptide
  VARIANT (1)..(15): Xaa = Any Amino Acid
CCXEYACNPAXCTGA

SEQ ID NO: 9496 - protein, 16 aa, Artificial Sequence
  Synthetically generated peptide
  VARIANT (1)..(16): Xaa = Any Amino Acid
CCXEYACNPAXXCTGA

SEQ ID NO: 9497 - protein, 17 aa, Artificial Sequence
  Synthetically generated peptide
  VARIANT (1)..(17): Xaa = Any Amino Acid
CCXEYACNPAXXXCTGA

SEQ ID NO: 9498 - protein, 17 aa, Artificial Sequence
  Synthetically generated peptide
  VARIANT (1)..(17): Xaa = Any Amino Acid
CCXEYACNPAXXCXTGA

SEQ ID NO: 9499 - protein, 17 aa, Artificial Sequence
  Synthetically generated peptide
  VARIANT (1)..(17): Xaa = Any Amino Acid
CCXEYACNPAXXCTXGA

SEQ ID NO: 9500 - protein, 17 aa, Artificial Sequence
  Synthetically generated peptide
  VARIANT (1)..(17): Xaa = Any Amino Acid
CCXEYACNPAXXCTGXA

SEQ ID NO: 9501 - protein, 16 aa, Artificial Sequence
  Synthetically generated peptide
  VARIANT (1)..(16): Xaa = Any Amino Acid
CCXEYACNPAXCXTGA

SEQ ID NO: 9502 - protein, 17 aa, Artificial Sequence
  Synthetically generated peptide
  VARIANT (1)..(17): Xaa = Any Amino Acid
CCXEYACNPAXCXXTGA

SEQ ID NO: 9503 - protein, 17 aa, Artificial Sequence
  Synthetically generated peptide
  VARIANT (1)..(17): Xaa = Any Amino Acid
CCXEYACNPAXCXTXGA

SEQ ID NO: 9504 - protein, 17 aa, Artificial Sequence
  Synthetically generated peptide
  VARIANT (1)..(17): Xaa = Any Amino Acid
CCXEYACNPAXCXTGXA

SEQ ID NO: 9505 - protein, 16 aa, Artificial Sequence
  Synthetically generated peptide
  VARIANT (1)..(16): Xaa = Any Amino Acid
CCXEYACNPAXCTXGA

SEQ ID NO: 9506 - protein, 17 aa, Artificial Sequence
  Synthetically generated peptide
  VARIANT (1)..(17): Xaa = Any Amino Acid
CCXEYACNPAXCTXXGA

SEQ ID NO: 9507 - protein, 17 aa, Artificial Sequence
  Synthetically generated peptide
  VARIANT (1)..(17): Xaa = Any Amino Acid
CCXEYACNPAXCTXGXA

SEQ ID NO: 9508 - protein, 16 aa, Artificial Sequence
  Synthetically generated peptide
  VARIANT (1)..(16): Xaa = Any Amino Acid
CCXEYACNPAXCTGXA

SEQ ID NO: 9509 - protein, 17 aa, Artificial Sequence
  Synthetically generated peptide
  VARIANT (1)..(17): Xaa = Any Amino Acid
CCXEYACNPAXCTGXXA

SEQ ID NO: 9510 - protein, 15 aa, Artificial Sequence
  Synthetically generated peptide
  VARIANT (1)..(15): Xaa = Any Amino Acid
CCXEYACNPACXTGA

SEQ ID NO: 9511 - protein, 16 aa, Artificial Sequence
  Synthetically generated peptide
  VARIANT (1)..(16): Xaa = Any Amino Acid
CCXEYACNPACXXTGA

SEQ ID NO: 9512 - protein, 17 aa, Artificial Sequence
  Synthetically generated peptide
  VARIANT (1)..(17): Xaa = Any Amino Acid
CCXEYACNPACXXXTGA

SEQ ID NO: 9513 - protein, 17 aa, Artificial Sequence
  Synthetically generated peptide
  VARIANT (1)..(17): Xaa = Any Amino Acid
CCXEYACNPACXXTXGA

SEQ ID NO: 9514 - protein, 17 aa, Artificial Sequence
  Synthetically generated peptide
  VARIANT (1)..(17): Xaa = Any Amino Acid
CCXEYACNPACXXTGXA

SEQ ID NO: 9515 - protein, 16 aa, Artificial Sequence
  Synthetically generated peptide
  VARIANT (1)..(16): Xaa = Any Amino Acid
CCXEYACNPACXTXGA

SEQ ID NO: 9516 - protein, 17 aa, Artificial Sequence
  Synthetically generated peptide
  VARIANT (1)..(17): Xaa = Any Amino Acid
CCXEYACNPACXTXXGA

SEQ ID NO: 9517 - protein, 17 aa, Artificial Sequence
  Synthetically generated peptide
  VARIANT (1)..(17): Xaa = Any Amino Acid
CCXEYACNPACXTXGXA

SEQ ID NO: 9518 - protein, 16 aa, Artificial Sequence
  Synthetically generated peptide
  VARIANT (1)..(16): Xaa = Any Amino Acid
CCXEYACNPACXTGXA

SEQ ID NO: 9519 - protein, 17 aa, Artificial Sequence
  Synthetically generated peptide
  VARIANT (1)..(17): Xaa = Any Amino Acid
CCXEYACNPACXTGXXA

SEQ ID NO: 9520 - protein, 15 aa, Artificial Sequence
  Synthetically generated peptide
  VARIANT (1)..(15): Xaa = Any Amino Acid
CCXEYACNPACTXGA

SEQ ID NO: 9521 - protein, 16 aa, Artificial Sequence
  Synthetically generated peptide
  VARIANT (1)..(16): Xaa = Any Amino Acid
CCXEYACNPACTXXGA

SEQ ID NO: 9522 - protein, 17 aa, Artificial Sequence
  Synthetically generated peptide
  VARIANT (1)..(17): Xaa = Any Amino Acid
CCXEYACNPACTXXXGA

SEQ ID NO: 9523 - protein, 17 aa, Artificial Sequence
  Synthetically generated peptide
  VARIANT (1)..(17): Xaa = Any Amino Acid
CCXEYACNPACTXXGXA

SEQ ID NO: 9524 - protein, 16 aa, Artificial Sequence
  Synthetically generated peptide
  VARIANT (1)..(16): Xaa = Any Amino Acid
CCXEYACNPACTXGXA

SEQ ID NO: 9525 - protein, 17 aa, Artificial Sequence
  Synthetically generated peptide
  VARIANT (1)..(17): Xaa = Any Amino Acid
CCXEYACNPACTXGXXA

SEQ ID NO: 9526 - protein, 15 aa, Artificial Sequence
  Synthetically generated peptide
  VARIANT (1)..(15): Xaa = Any Amino Acid
CCXEYACNPACTGXA

SEQ ID NO: 9527 - protein, 16 aa, Artificial Sequence
  Synthetically generated peptide
  VARIANT (1)..(16): Xaa = Any Amino Acid
CCXEYACNPACTGXXA

SEQ ID NO: 9528 - protein, 17 aa, Artificial Sequence
  Synthetically generated peptide
  VARIANT (1)..(17): Xaa = Any Amino Acid
CCXEYACNPACTGXXXA

SEQ ID NO: 9529 - protein, 14 aa, Artificial Sequence
  Synthetically generated peptide
  VARIANT (1)..(14): Xaa = Any Amino Acid
CCEXYACNPACTGA

SEQ ID NO: 9530 - protein, 15 aa, Artificial Sequence
  Synthetically generated peptide
  VARIANT (1)..(15): Xaa = Any Amino Acid
CCEXXYACNPACTGA

SEQ ID NO: 9531 - protein, 16 aa, Artificial Sequence
  Synthetically generated peptide
  VARIANT (1)..(16): Xaa = Any Amino Acid
CCEXXXYACNPACTGA

SEQ ID NO: 9532 - protein, 17 aa, Artificial Sequence
  Synthetically generated peptide
  VARIANT (1)..(17): Xaa = Any Amino Acid
CCEXXXXYACNPACTGA

SEQ ID NO: 9533 - protein, 17 aa, Artificial Sequence
  Synthetically generated peptide
  VARIANT (1)..(17): Xaa = Any Amino Acid
CCEXXXYXACNPACTGA

SEQ ID NO: 9534 - protein, 17 aa, Artificial Sequence
  Synthetically generated peptide
  VARIANT (1)..(17): Xaa = Any Amino Acid
CCEXXXYACXNPACTGA

SEQ ID NO: 9535 - protein, 17 aa, Artificial Sequence
  Synthetically generated peptide
  VARIANT (1)..(17): Xaa = Any Amino Acid
CCEXXXYACNXPACTGA

SEQ ID NO: 9536 - protein, 17 aa, Artificial Sequence
  Synthetically generated peptide
  VARIANT (1)..(17): Xaa = Any Amino Acid
CCEXXXYACNPXACTGA

SEQ ID NO: 9537 - protein, 17 aa, Artificial Sequence
  Synthetically generated peptide
  VARIANT (1)..(17): Xaa = Any Amino Acid
CCEXXXYACNPAXCTGA

SEQ ID NO: 9538 - protein, 17 aa, Artificial Sequence
  Synthetically generated peptide
  VARIANT (1)..(17): Xaa = Any Amino Acid
CCEXXXYACNPACXTGA

SEQ ID NO: 9539 - protein, 17 aa, Artificial Sequence
  Synthetically generated peptide
  VARIANT (1)..(17): Xaa = Any Amino Acid
CCEXXXYACNPACTXGA

SEQ ID NO: 9540 - protein, 17 aa, Artificial Sequence
  Synthetically generated peptide
  VARIANT (1)..(17): Xaa = Any Amino Acid
CCEXXXYACNPACTGXA

SEQ ID NO: 9541 - protein, 16 aa, Artificial Sequence
  Synthetically generated peptide
  VARIANT (1)..(16): Xaa = Any Amino Acid
CCEXXYXACNPACTGA

SEQ ID NO: 9542 - protein, 17 aa, Artificial Sequence
  Synthetically generated peptide
  VARIANT (1)..(17): Xaa = Any Amino Acid
CCEXXYXXACNPACTGA

SEQ ID NO: 9543 - protein, 17 aa, Artificial Sequence
  Synthetically generated peptide
  VARIANT (1)..(17): Xaa = Any Amino Acid
CCEXXYXACXNPACTGA

SEQ ID NO: 9544 - protein, 17 aa, Artificial Sequence
  Synthetically generated peptide
  VARIANT (1)..(17): Xaa = Any Amino Acid
CCEXXYXACNXPACTGA

SEQ ID NO: 9545 - protein, 17 aa, Artificial Sequence
  Synthetically generated peptide
  VARIANT (1)..(17): Xaa = Any Amino Acid
CCEXXYXACNPXACTGA

SEQ ID NO: 9546 - protein, 17 aa, Artificial Sequence
  Synthetically generated peptide
  VARIANT (1)..(17): Xaa = Any Amino Acid
CCEXXYXACNPAXCTGA

SEQ ID NO: 9547 - protein, 17 aa, Artificial Sequence
  Synthetically generated peptide
  VARIANT (1)..(17): Xaa = Any Amino Acid
CCEXXYXACNPACXTGA

SEQ ID NO: 9548 - protein, 17 aa, Artificial Sequence
  Synthetically generated peptide
  VARIANT (1)..(17): Xaa = Any Amino Acid
CCEXXYXACNPACTXGA

SEQ ID NO: 9549 - protein, 17 aa, Artificial Sequence
  Synthetically generated peptide
  VARIANT (1)..(17): Xaa = Any Amino Acid
CCEXXYXACNPACTGXA

SEQ ID NO: 9550 - protein, 16 aa, Artificial Sequence
  Synthetically generated peptide
  VARIANT (1)..(16): Xaa = Any Amino Acid
CCEXXYACXNPACTGA

SEQ ID NO: 9551 - protein, 17 aa, Artificial Sequence
  Synthetically generated peptide
  VARIANT (1)..(17): Xaa = Any Amino Acid
CCEXXYACXXNPACTGA

SEQ ID NO: 9552 - protein, 17 aa, Artificial Sequence
  Synthetically generated peptide
  VARIANT (1)..(17): Xaa = Any Amino Acid
CCEXXYACXNXPACTGA

SEQ ID NO: 9553 - protein, 17 aa, Artificial Sequence
  Synthetically generated peptide
  VARIANT (1)..(17): Xaa = Any Amino Acid
CCEXXYACXNPXACTGA

SEQ ID NO: 9554 - protein, 17 aa, Artificial Sequence
  Synthetically generated peptide
  VARIANT (1)..(17): Xaa = Any Amino Acid
CCEXXYACXNPAXCTGA

SEQ ID NO: 9555 - protein, 17 aa, Artificial Sequence
  Synthetically generated peptide
  VARIANT (1)..(17): Xaa = Any Amino Acid
CCEXXYACXNPACXTGA

SEQ ID NO: 9556 - protein, 17 aa, Artificial Sequence
  Synthetically generated peptide
  VARIANT (1)..(17): Xaa = Any Amino Acid
CCEXXYACXNPACTXGA

SEQ ID NO: 9557 - protein, 17 aa, Artificial Sequence
  Synthetically generated peptide
  VARIANT (1)..(17): Xaa = Any Amino Acid
CCEXXYACXNPACTGXA

SEQ ID NO: 9558 - protein, 16 aa, Artificial Sequence
  Synthetically generated peptide
  VARIANT (1)..(16): Xaa = Any Amino Acid
CCEXXYACNXPACTGA

SEQ ID NO: 9559 - protein, 17 aa, Artificial Sequence
  Synthetically generated peptide
  VARIANT (1)..(17): Xaa = Any Amino Acid
CCEXXYACNXXPACTGA

SEQ ID NO: 9560 - protein, 17 aa, Artificial Sequence
  Synthetically generated peptide
  VARIANT (1)..(17): Xaa = Any Amino Acid
CCEXXYACNXPXACTGA

SEQ ID NO: 9561 - protein, 17 aa, Artificial Sequence
  Synthetically generated peptide
  VARIANT (1)..(17): Xaa = Any Amino Acid
CCEXXYACNXPAXCTGA

SEQ ID NO: 9562 - protein, 17 aa, Artificial Sequence
  Synthetically generated peptide
  VARIANT (1)..(17): Xaa = Any Amino Acid
CCEXXYACNXPACXTGA

SEQ ID NO: 9563 - protein, 17 aa, Artificial Sequence
  Synthetically generated peptide
  VARIANT (1)..(17): Xaa = Any Amino Acid
CCEXXYACNXPACTXGA

SEQ ID NO: 9564 - protein, 17 aa, Artificial Sequence
  Synthetically generated peptide
  VARIANT (1)..(17): Xaa = Any Amino Acid
CCEXXYACNXPACTGXA

SEQ ID NO: 9565 - protein, 16 aa, Artificial Sequence
  Synthetically generated peptide
  VARIANT (1)..(16): Xaa = Any Amino Acid
CCEXXYACNPXACTGA

SEQ ID NO: 9566 - protein, 17 aa, Artificial Sequence
  Synthetically generated peptide
  VARIANT (1)..(17): Xaa = Any Amino Acid
CCEXXYACNPXXACTGA

SEQ ID NO: 9567 - protein, 17 aa, Artificial Sequence
  Synthetically generated peptide
  VARIANT (1)..(17): Xaa = Any Amino Acid
CCEXXYACNPXAXCTGA

SEQ ID NO: 9568 - protein, 17 aa, Artificial Sequence
  Synthetically generated peptide
  VARIANT (1)..(17): Xaa = Any Amino Acid
CCEXXYACNPXACXTGA

SEQ ID NO: 9569 - protein, 17 aa, Artificial Sequence
  Synthetically generated peptide
  VARIANT (1)..(17): Xaa = Any Amino Acid
CCEXXYACNPXACTXGA

SEQ ID NO: 9570 - protein, 17 aa, Artificial Sequence
  Synthetically generated peptide
  VARIANT (1)..(17): Xaa = Any Amino Acid
CCEXXYACNPXACTGXA

SEQ ID NO: 9571 - protein, 16 aa, Artificial Sequence
  Synthetically generated peptide
  VARIANT (1)..(16): Xaa = Any Amino Acid
CCEXXYACNPAXCTGA

SEQ ID NO: 9572 - protein, 17 aa, Artificial Sequence
  Synthetically generated peptide
  VARIANT (1)..(17): Xaa = Any Amino Acid
CCEXXYACNPAXXCTGA

SEQ ID NO: 9573 - protein, 17 aa, Artificial Sequence
  Synthetically generated peptide
  VARIANT (1)..(17): Xaa = Any Amino Acid
CCEXXYACNPAXCXTGA

SEQ ID NO: 9574 - protein, 17 aa, Artificial Sequence
  Synthetically generated peptide
  VARIANT (1)..(17): Xaa = Any Amino Acid
CCEXXYACNPAXCTXGA

SEQ ID NO: 9575 - protein, 17 aa, Artificial Sequence
  Synthetically generated peptide
  VARIANT (1)..(17): Xaa = Any Amino Acid
CCEXXYACNPAXCTGXA

SEQ ID NO: 9576 - protein, 16 aa, Artificial Sequence
  Synthetically generated peptide
  VARIANT (1)..(16): Xaa = Any Amino Acid
CCEXXYACNPACXTGA

SEQ ID NO: 9577 - protein, 17 aa, Artificial Sequence
  Synthetically generated peptide
  VARIANT (1)..(17): Xaa = Any Amino Acid
CCEXXYACNPACXXTGA

SEQ ID NO: 9578 - protein, 17 aa, Artificial Sequence
  Synthetically generated peptide
  VARIANT (1)..(17): Xaa = Any Amino Acid
CCEXXYACNPACXTXGA

SEQ ID NO: 9579 - protein, 17 aa, Artificial Sequence
  Synthetically generated peptide
  VARIANT (1)..(17): Xaa = Any Amino Acid
CCEXXYACNPACXTGXA

SEQ ID NO: 9580 - protein, 16 aa, Artificial Sequence
  Synthetically generated peptide
  VARIANT (1)..(16): Xaa = Any Amino Acid
CCEXXYACNPACTXGA

SEQ ID NO: 9581 - protein, 17 aa, Artificial Sequence
  Synthetically generated peptide
  VARIANT (1)..(17): Xaa = Any Amino Acid
CCEXXYACNPACTXXGA

SEQ ID NO: 9582 - protein, 17 aa, Artificial Sequence
  Synthetically generated peptide
  VARIANT (1)..(17): Xaa = Any Amino Acid
CCEXXYACNPACTXGXA

SEQ ID NO: 9583 - protein, 16 aa, Artificial Sequence
  Synthetically generated peptide
  VARIANT (1)..(16): Xaa = Any Amino Acid
CCEXXYACNPACTGXA

SEQ ID NO: 9584 - protein, 17 aa, Artificial Sequence
  Synthetically generated peptide
  VARIANT (1)..(17): Xaa = Any Amino Acid
CCEXXYACNPACTGXXA

SEQ ID NO: 9585 - protein, 15 aa, Artificial Sequence
  Synthetically generated peptide
  VARIANT (1)..(15): Xaa = Any Amino Acid
CCEXYXACNPACTGA

SEQ ID NO: 9586 - protein, 16 aa, Artificial Sequence
  Synthetically generated peptide
  VARIANT (1)..(16): Xaa = Any Amino Acid
CCEXYXXACNPACTGA

SEQ ID NO: 9587 - protein, 17 aa, Artificial Sequence
  Synthetically generated peptide
  VARIANT (1)..(17): Xaa = Any Amino Acid
CCEXYXXXACNPACTGA

SEQ ID NO: 9588 - protein, 17 aa, Artificial Sequence
  Synthetically generated peptide
  VARIANT (1)..(17): Xaa = Any Amino Acid
CCEXYXXACXNPACTGA

SEQ ID NO: 9589 - protein, 17 aa, Artificial Sequence
  Synthetically generated peptide
  VARIANT (1)..(17): Xaa = Any Amino Acid
CCEXYXXACNXPACTGA

SEQ ID NO: 9590 - protein, 17 aa, Artificial Sequence
  Synthetically generated peptide
  VARIANT (1)..(17): Xaa = Any Amino Acid
CCEXYXXACNPXACTGA

SEQ ID NO: 9591 - protein, 17 aa, Artificial Sequence
  Synthetically generated peptide
  VARIANT (1)..(17): Xaa = Any Amino Acid
CCEXYXXACNPAXCTGA

SEQ ID NO: 9592 - protein, 17 aa, Artificial Sequence
  Synthetically generated peptide
  VARIANT (1)..(17): Xaa = Any Amino Acid
CCEXYXXACNPACXTGA

SEQ ID NO: 9593 - protein, 17 aa, Artificial Sequence
  Synthetically generated peptide
  VARIANT (1)..(17): Xaa = Any Amino Acid
CCEXYXXACNPACTXGA

SEQ ID NO: 9594 - protein, 17 aa, Artificial Sequence
  Synthetically generated peptide
  VARIANT (1)..(17): Xaa = Any Amino Acid
CCEXYXXACNPACTGXA

SEQ ID NO: 9595 - protein, 16 aa, Artificial Sequence
  Synthetically generated peptide
  VARIANT (1)..(16): Xaa = Any Amino Acid
CCEXYXACXNPACTGA

SEQ ID NO: 9596 - protein, 17 aa, Artificial Sequence
  Synthetically generated peptide
  VARIANT (1)..(17): Xaa = Any Amino Acid
CCEXYXACXXNPACTGA

SEQ ID NO: 9597 - protein, 17 aa, Artificial Sequence
  Synthetically generated peptide
  VARIANT (1)..(17): Xaa = Any Amino Acid
CCEXYXACXNXPACTGA

SEQ ID NO: 9598 - protein, 17 aa, Artificial Sequence
  Synthetically generated peptide
  VARIANT (1)..(17): Xaa = Any Amino Acid
CCEXYXACXNPXACTGA

SEQ ID NO: 9599 - protein, 17 aa, Artificial Sequence
  Synthetically generated peptide
  VARIANT (1)..(17): Xaa = Any Amino Acid
CCEXYXACXNPAXCTGA

SEQ ID NO: 9600 - protein, 17 aa, Artificial Sequence
  Synthetically generated peptide
  VARIANT (1)..(17): Xaa = Any Amino Acid
CCEXYXACXNPACXTGA

SEQ ID NO: 9601 - protein, 17 aa, Artificial Sequence
  Synthetically generated peptide
  VARIANT (1)..(17): Xaa = Any Amino Acid
CCEXYXACXNPACTXGA

SEQ ID NO: 9602 - protein, 17 aa, Artificial Sequence
  Synthetically generated peptide
  VARIANT (1)..(17): Xaa = Any Amino Acid
CCEXYXACXNPACTGXA

SEQ ID NO: 9603 - protein, 16 aa, Artificial Sequence
  Synthetically generated peptide
  VARIANT (1)..(16): Xaa = Any Amino Acid
CCEXYXACNXPACTGA

SEQ ID NO: 9604 - protein, 17 aa, Artificial Sequence
  Synthetically generated peptide
  VARIANT (1)..(17): Xaa = Any Amino Acid
CCEXYXACNXXPACTGA

SEQ ID NO: 9605 - protein, 17 aa, Artificial Sequence
  Synthetically generated peptide
  VARIANT (1)..(17): Xaa = Any Amino Acid
CCEXYXACNXPXACTGA

SEQ ID NO: 9606 - protein, 17 aa, Artificial Sequence
  Synthetically generated peptide
  VARIANT (1)..(17): Xaa = Any Amino Acid
CCEXYXACNXPAXCTGA

SEQ ID NO: 9607 - protein, 17 aa, Artificial Sequence
  Synthetically generated peptide
  VARIANT (1)..(17): Xaa = Any Amino Acid
CCEXYXACNXPACXTGA

SEQ ID NO: 9608 - protein, 17 aa, Artificial Sequence
  Synthetically generated peptide
  VARIANT (1)..(17): Xaa = Any Amino Acid
CCEXYXACNXPACTXGA

SEQ ID NO: 9609 - protein, 17 aa, Artificial Sequence
  Synthetically generated peptide
  VARIANT (1)..(17): Xaa = Any Amino Acid
CCEXYXACNXPACTGXA

SEQ ID NO: 9610 - protein, 16 aa, Artificial Sequence
  Synthetically generated peptide
  VARIANT (1)..(16): Xaa = Any Amino Acid
CCEXYXACNPXACTGA

SEQ ID NO: 9611 - protein, 17 aa, Artificial Sequence
  Synthetically generated peptide
  VARIANT (1)..(17): Xaa = Any Amino Acid
CCEXYXACNPXXACTGA

SEQ ID NO: 9612 - protein, 17 aa, Artificial Sequence
  Synthetically generated peptide
  VARIANT (1)..(17): Xaa = Any Amino Acid
CCEXYXACNPXAXCTGA

SEQ ID NO: 9613 - protein, 17 aa, Artificial Sequence
  Synthetically generated peptide
  VARIANT (1)..(17): Xaa = Any Amino Acid
CCEXYXACNPXACXTGA

SEQ ID NO: 9614 - protein, 17 aa, Artificial Sequence
  Synthetically generated peptide
  VARIANT (1)..(17): Xaa = Any Amino Acid
CCEXYXACNPXACTXGA

SEQ ID NO: 9615 - protein, 17 aa, Artificial Sequence
  Synthetically generated peptide
  VARIANT (1)..(17): Xaa = Any Amino Acid
CCEXYXACNPXACTGXA

SEQ ID NO: 9616 - protein, 16 aa, Artificial Sequence
  Synthetically generated peptide
  VARIANT (1)..(16): Xaa = Any Amino Acid
CCEXYXACNPAXCTGA

SEQ ID NO: 9617 - protein, 17 aa, Artificial Sequence
  Synthetically generated peptide
  VARIANT (1)..(17): Xaa = Any Amino Acid
CCEXYXACNPAXXCTGA

SEQ ID NO: 9618 - protein, 17 aa, Artificial Sequence
  Synthetically generated peptide
  VARIANT (1)..(17): Xaa = Any Amino Acid
CCEXYXACNPAXCXTGA

SEQ ID NO: 9619 - protein, 17 aa, Artificial Sequence
  Synthetically generated peptide
  VARIANT (1)..(17): Xaa = Any Amino Acid
CCEXYXACNPAXCTXGA

SEQ ID NO: 9620 - protein, 17 aa, Artificial Sequence
  Synthetically generated peptide
  VARIANT (1)..(17): Xaa = Any Amino Acid
CCEXYXACNPAXCTGXA

SEQ ID NO: 9621 - protein, 16 aa, Artificial Sequence
  Synthetically generated peptide
  VARIANT (1)..(16): Xaa = Any Amino Acid
CCEXYXACNPACXTGA

SEQ ID NO: 9622 - protein, 17 aa, Artificial Sequence
  Synthetically generated peptide
  VARIANT (1)..(17): Xaa = Any Amino Acid
CCEXYXACNPACXXTGA

SEQ ID NO: 9623 - protein, 17 aa, Artificial Sequence
  Synthetically generated peptide
  VARIANT (1)..(17): Xaa = Any Amino Acid
CCEXYXACNPACXTXGA

SEQ ID NO: 9624 - protein, 17 aa, Artificial Sequence
  Synthetically generated peptide
  VARIANT (1)..(17): Xaa = Any Amino Acid
CCEXYXACNPACXTGXA

SEQ ID NO: 9625 - protein, 16 aa, Artificial Sequence
  Synthetically generated peptide
  VARIANT (1)..(16): Xaa = Any Amino Acid
CCEXYXACNPACTXGA

SEQ ID NO: 9626 - protein, 17 aa, Artificial Sequence
  Synthetically generated peptide
  VARIANT (1)..(17): Xaa = Any Amino Acid
CCEXYXACNPACTXXGA

SEQ ID NO: 9627 - protein, 17 aa, Artificial Sequence
  Synthetically generated peptide
  VARIANT (1)..(17): Xaa = Any Amino Acid
CCEXYXACNPACTXGXA

SEQ ID NO: 9628 - protein, 16 aa, Artificial Sequence
  Synthetically generated peptide
  VARIANT (1)..(16): Xaa = Any Amino Acid
CCEXYXACNPACTGXA

SEQ ID NO: 9629 - protein, 17 aa, Artificial Sequence
  Synthetically generated peptide
  VARIANT (1)..(17): Xaa = Any Amino Acid
CCEXYXACNPACTGXXA

SEQ ID NO: 9630 - protein, 15 aa, Artificial Sequence
  Synthetically generated peptide
  VARIANT (1)..(15): Xaa = Any Amino Acid
CCEXYACXNPACTGA

SEQ ID NO: 9631 - protein, 16 aa, Artificial Sequence
  Synthetically generated peptide
  VARIANT (1)..(16): Xaa = Any Amino Acid
CCEXYACXXNPACTGA

SEQ ID NO: 9632 - protein, 17 aa, Artificial Sequence
  Synthetically generated peptide
  VARIANT (1)..(17): Xaa = Any Amino Acid
CCEXYACXXXNPACTGA

SEQ ID NO: 9633 - protein, 17 aa, Artificial Sequence
  Synthetically generated peptide
  VARIANT (1)..(17): Xaa = Any Amino Acid
CCEXYACXXNXPACTGA

SEQ ID NO: 9634 - protein, 17 aa, Artificial Sequence
  Synthetically generated peptide
  VARIANT (1)..(17): Xaa = Any Amino Acid
CCEXYACXXNPXACTGA

SEQ ID NO: 9635 - protein, 17 aa, Artificial Sequence
  Synthetically generated peptide
  VARIANT (1)..(17): Xaa = Any Amino Acid
CCEXYACXXNPAXCTGA

SEQ ID NO: 9636 - protein, 17 aa, Artificial Sequence
  Synthetically generated peptide
  VARIANT (1)..(17): Xaa = Any Amino Acid
CCEXYACXXNPACXTGA

SEQ ID NO: 9637 - protein, 17 aa, Artificial Sequence
  Synthetically generated peptide
  VARIANT (1)..(17): Xaa = Any Amino Acid
CCEXYACXXNPACTXGA

SEQ ID NO: 9638 - protein, 17 aa, Artificial Sequence
  Synthetically generated peptide
  VARIANT (1)..(17): Xaa = Any Amino Acid
CCEXYACXXNPACTGXA

SEQ ID NO: 9639 - protein, 16 aa, Artificial Sequence
  Synthetically generated peptide
  VARIANT (1)..(16): Xaa = Any Amino Acid
CCEXYACXNXPACTGA

SEQ ID NO: 9640 - protein, 17 aa, Artificial Sequence
  Synthetically generated peptide
  VARIANT (1)..(17): Xaa = Any Amino Acid
CCEXYACXNXXPACTGA

SEQ ID NO: 9641 - protein, 17 aa, Artificial Sequence
  Synthetically generated peptide
  VARIANT (1)..(17): Xaa = Any Amino Acid
CCEXYACXNXPXACTGA

SEQ ID NO: 9642 - protein, 17 aa, Artificial Sequence
  Synthetically generated peptide
  VARIANT (1)..(17): Xaa = Any Amino Acid
CCEXYACXNXPAXCTGA

SEQ ID NO: 9643 - protein, 17 aa, Artificial Sequence
  Synthetically generated peptide
  VARIANT (1)..(17): Xaa = Any Amino Acid
CCEXYACXNXPACXTGA

SEQ ID NO: 9644 - protein, 17 aa, Artificial Sequence
  Synthetically generated peptide
  VARIANT (1)..(17): Xaa = Any Amino Acid
CCEXYACXNXPACTXGA

SEQ ID NO: 9645 - protein, 17 aa, Artificial Sequence
  Synthetically generated peptide
  VARIANT (1)..(17): Xaa = Any Amino Acid
CCEXYACXNXPACTGXA

SEQ ID NO: 9646 - protein, 16 aa, Artificial Sequence
  Synthetically generated peptide
  VARIANT (1)..(16): Xaa = Any Amino Acid
CCEXYACXNPXACTGA

SEQ ID NO: 9647 - protein, 17 aa, Artificial Sequence
  Synthetically generated peptide
  VARIANT (1)..(17): Xaa = Any Amino Acid
CCEXYACXNPXXACTGA

SEQ ID NO: 9648 - protein, 17 aa, Artificial Sequence
  Synthetically generated peptide
  VARIANT (1)..(17): Xaa = Any Amino Acid
CCEXYACXNPXAXCTGA

SEQ ID NO: 9649 - protein, 17 aa, Artificial Sequence
  Synthetically generated peptide
  VARIANT (1)..(17): Xaa = Any Amino Acid
CCEXYACXNPXACXTGA

SEQ ID NO: 9650 - protein, 17 aa, Artificial Sequence
  Synthetically generated peptide
  VARIANT (1)..(17): Xaa = Any Amino Acid
CCEXYACXNPXACTXGA

SEQ ID NO: 9651 - protein, 17 aa, Artificial Sequence
  Synthetically generated peptide
  VARIANT (1)..(17): Xaa = Any Amino Acid
CCEXYACXNPXACTGXA

SEQ ID NO: 9652 - protein, 16 aa, Artificial Sequence
  Synthetically generated peptide
  VARIANT (1)..(16): Xaa = Any Amino Acid
CCEXYACXNPAXCTGA

SEQ ID NO: 9653 - protein, 17 aa, Artificial Sequence
  Synthetically generated peptide
  VARIANT (1)..(17): Xaa = Any Amino Acid
CCEXYACXNPAXXCTGA

SEQ ID NO: 9654 - protein, 17 aa, Artificial Sequence
  Synthetically generated peptide
  VARIANT (1)..(17): Xaa = Any Amino Acid
CCEXYACXNPAXCXTGA

SEQ ID NO: 9655 - protein, 17 aa, Artificial Sequence
  Synthetically generated peptide
  VARIANT (1)..(17): Xaa = Any Amino Acid
CCEXYACXNPAXCTXGA

SEQ ID NO: 9656 - protein, 17 aa, Artificial Sequence
  Synthetically generated peptide
  VARIANT (1)..(17): Xaa = Any Amino Acid
CCEXYACXNPAXCTGXA

SEQ ID NO: 9657 - protein, 16 aa, Artificial Sequence
  Synthetically generated peptide
  VARIANT (1)..(16): Xaa = Any Amino Acid
CCEXYACXNPACXTGA

SEQ ID NO: 9658 - protein, 17 aa, Artificial Sequence
  Synthetically generated peptide
  VARIANT (1)..(17): Xaa = Any Amino Acid
CCEXYACXNPACXXTGA

SEQ ID NO: 9659 - protein, 17 aa, Artificial Sequence
  Synthetically generated peptide
  VARIANT (1)..(17): Xaa = Any Amino Acid
CCEXYACXNPACXTXGA

SEQ ID NO: 9660 - protein, 17 aa, Artificial Sequence
  Synthetically generated peptide
  VARIANT (1)..(17): Xaa = Any Amino Acid
CCEXYACXNPACXTGXA

SEQ ID NO: 9661 - protein, 16 aa, Artificial Sequence
  Synthetically generated peptide
  VARIANT (1)..(16): Xaa = Any Amino Acid
CCEXYACXNPACTXGA

SEQ ID NO: 9662 - protein, 17 aa, Artificial Sequence
  Synthetically generated peptide
  VARIANT (1)..(17): Xaa = Any Amino Acid
CCEXYACXNPACTXXGA

SEQ ID NO: 9663 - protein, 17 aa, Artificial Sequence
  Synthetically generated peptide
  VARIANT (1)..(17): Xaa = Any Amino Acid
CCEXYACXNPACTXGXA

SEQ ID NO: 9664 - protein, 16 aa, Artificial Sequence
  Synthetically generated peptide
  VARIANT (1)..(16): Xaa = Any Amino Acid
CCEXYACXNPACTGXA

SEQ ID NO: 9665 - protein, 17 aa, Artificial Sequence
  Synthetically generated peptide
  VARIANT (1)..(17): Xaa = Any Amino Acid
CCEXYACXNPACTGXXA

SEQ ID NO: 9666 - protein, 15 aa, Artificial Sequence
  Synthetically generated peptide
  VARIANT (1)..(15): Xaa = Any Amino Acid
CCEXYACNXPACTGA

SEQ ID NO: 9667 - protein, 16 aa, Artificial Sequence
  Synthetically generated peptide
  VARIANT (1)..(16): Xaa = Any Amino Acid
CCEXYACNXXPACTGA

SEQ ID NO: 9668 - protein, 17 aa, Artificial Sequence
  Synthetically generated peptide
  VARIANT (1)..(17): Xaa = Any Amino Acid
CCEXYACNXXXPACTGA

SEQ ID NO: 9669 - protein, 17 aa, Artificial Sequence
  Synthetically generated peptide
  VARIANT (1)..(17): Xaa = Any Amino Acid
CCEXYACNXXPXACTGA

SEQ ID NO: 9670 - protein, 17 aa, Artificial Sequence
  Synthetically generated peptide
  VARIANT (1)..(17): Xaa = Any Amino Acid
CCEXYACNXXPAXCTGA

SEQ ID NO: 9671 - protein, 17 aa, Artificial Sequence
  Synthetically generated peptide
  VARIANT (1)..(17): Xaa = Any Amino Acid
CCEXYACNXXPACXTGA

SEQ ID NO: 9672 - protein, 17 aa, Artificial Sequence
  Synthetically generated peptide
  VARIANT (1)..(17): Xaa = Any Amino Acid
CCEXYACNXXPACTXGA

SEQ ID NO: 9673 - protein, 17 aa, Artificial Sequence
  Synthetically generated peptide
  VARIANT (1)..(17): Xaa = Any Amino Acid
CCEXYACNXXPACTGXA

SEQ ID NO: 9674 - protein, 16 aa, Artificial Sequence
  Synthetically generated peptide
  VARIANT (1)..(16): Xaa = Any Amino Acid
CCEXYACNXPXACTGA

SEQ ID NO: 9675 - protein, 17 aa, Artificial Sequence
  Synthetically generated peptide
  VARIANT (1)..(17): Xaa = Any Amino Acid
CCEXYACNXPXXACTGA

SEQ ID NO: 9676 - protein, 17 aa, Artificial Sequence
  Synthetically generated peptide
  VARIANT (1)..(17): Xaa = Any Amino Acid
CCEXYACNXPXAXCTGA

SEQ ID NO: 9677 - protein, 17 aa, Artificial Sequence
  Synthetically generated peptide
  VARIANT (1)..(17): Xaa = Any Amino Acid
CCEXYACNXPXACXTGA

SEQ ID NO: 9678 - protein, 17 aa, Artificial Sequence
  Synthetically generated peptide
  VARIANT (1)..(17): Xaa = Any Amino Acid
CCEXYACNXPXACTXGA

SEQ ID NO: 9679 - protein, 17 aa, Artificial Sequence
  Synthetically generated peptide
  VARIANT (1)..(17): Xaa = Any Amino Acid
CCEXYACNXPXACTGXA

SEQ ID NO: 9680 - protein, 16 aa, Artificial Sequence
  Synthetically generated peptide
  VARIANT (1)..(16): Xaa = Any Amino Acid
CCEXYACNXPAXCTGA

SEQ ID NO: 9681 - protein, 17 aa, Artificial Sequence
  Synthetically generated peptide
  VARIANT (1)..(17): Xaa = Any Amino Acid
CCEXYACNXPAXXCTGA

SEQ ID NO: 9682 - protein, 17 aa, Artificial Sequence
  Synthetically generated peptide
  VARIANT (1)..(17): Xaa = Any Amino Acid
CCEXYACNXPAXCXTGA

SEQ ID NO: 9683 - protein, 17 aa, Artificial Sequence
  Synthetically generated peptide
  VARIANT (1)..(17): Xaa = Any Amino Acid
CCEXYACNXPAXCTXGA

SEQ ID NO: 9684 - protein, 17 aa, Artificial Sequence
  Synthetically generated peptide
  VARIANT (1)..(17): Xaa = Any Amino Acid
CCEXYACNXPAXCTGXA

SEQ ID NO: 9685 - protein, 16 aa, Artificial Sequence
  Synthetically generated peptide
  VARIANT (1)..(16): Xaa = Any Amino Acid
CCEXYACNXPACXTGA

SEQ ID NO: 9686 - protein, 17 aa, Artificial Sequence
  Synthetically generated peptide
  VARIANT (1)..(17): Xaa = Any Amino Acid
CCEXYACNXPACXXTGA

SEQ ID NO: 9687 - protein, 17 aa, Artificial Sequence
  Synthetically generated peptide
  VARIANT (1)..(17): Xaa = Any Amino Acid
CCEXYACNXPACXTXGA

SEQ ID NO: 9688 - protein, 17 aa, Artificial Sequence
  Synthetically generated peptide
  VARIANT (1)..(17): Xaa = Any Amino Acid
CCEXYACNXPACXTGXA

SEQ ID NO: 9689 - protein, 16 aa, Artificial Sequence
  Synthetically generated peptide
  VARIANT (1)..(16): Xaa = Any Amino Acid
CCEXYACNXPACTXGA

SEQ ID NO: 9690 - protein, 17 aa, Artificial Sequence
  Synthetically generated peptide
  VARIANT (1)..(17): Xaa = Any Amino Acid
CCEXYACNXPACTXXGA

SEQ ID NO: 9691 - protein, 17 aa, Artificial Sequence
  Synthetically generated peptide
  VARIANT (1)..(17): Xaa = Any Amino Acid
CCEXYACNXPACTXGXA

SEQ ID NO: 9692 - protein, 16 aa, Artificial Sequence
  Synthetically generated peptide
  VARIANT (1)..(16): Xaa = Any Amino Acid
CCEXYACNXPACTGXA

SEQ ID NO: 9693 - protein, 17 aa, Artificial Sequence
  Synthetically generated peptide
  VARIANT (1)..(17): Xaa = Any Amino Acid
CCEXYACNXPACTGXXA

SEQ ID NO: 9694 - protein, 15 aa, Artificial Sequence
  Synthetically generated peptide
  VARIANT (1)..(15): Xaa = Any Amino Acid
CCEXYACNPXACTGA

SEQ ID NO: 9695 - protein, 16 aa, Artificial Sequence
  Synthetically generated peptide
  VARIANT (1)..(16): Xaa = Any Amino Acid
CCEXYACNPXXACTGA

SEQ ID NO: 9696 - protein, 17 aa, Artificial Sequence
  Synthetically generated peptide
  VARIANT (1)..(17): Xaa = Any Amino Acid
CCEXYACNPXXXACTGA

SEQ ID NO: 9697 - protein, 17 aa, Artificial Sequence
  Synthetically generated peptide
  VARIANT (1)..(17): Xaa = Any Amino Acid
CCEXYACNPXXAXCTGA

SEQ ID NO: 9698 - protein, 17 aa, Artificial Sequence
  Synthetically generated peptide
  VARIANT (1)..(17): Xaa = Any Amino Acid
CCEXYACNPXXACXTGA

SEQ ID NO: 9699 - protein, 17 aa, Artificial Sequence
  Synthetically generated peptide
  VARIANT (1)..(17): Xaa = Any Amino Acid
CCEXYACNPXXACTXGA

SEQ ID NO: 9700 - protein, 17 aa, Artificial Sequence
  Synthetically generated peptide
  VARIANT (1)..(17): Xaa = Any Amino Acid
CCEXYACNPXXACTGXA

SEQ ID NO: 9701 - protein, 16 aa, Artificial Sequence
  Synthetically generated peptide
  VARIANT (1)..(16): Xaa = Any Amino Acid
CCEXYACNPXAXCTGA

SEQ ID NO: 9702 - protein, 17 aa, Artificial Sequence
  Synthetically generated peptide
  VARIANT (1)..(17): Xaa = Any Amino Acid
CCEXYACNPXAXXCTGA

SEQ ID NO: 9703 - protein, 17 aa, Artificial Sequence
  Synthetically generated peptide
  VARIANT (1)..(17): Xaa = Any Amino Acid
CCEXYACNPXAXCXTGA

SEQ ID NO: 9704 - protein, 17 aa, Artificial Sequence
  Synthetically generated peptide
  VARIANT (1)..(17): Xaa = Any Amino Acid
CCEXYACNPXAXCTXGA

SEQ ID NO: 9705 - protein, 17 aa, Artificial Sequence
  Synthetically generated peptide
  VARIANT (1)..(17): Xaa = Any Amino Acid
CCEXYACNPXAXCTGXA

SEQ ID NO: 9706 - protein, 16 aa, Artificial Sequence
  Synthetically generated peptide
  VARIANT (1)..(16): Xaa = Any Amino Acid
CCEXYACNPXACXTGA

SEQ ID NO: 9707 - protein, 17 aa, Artificial Sequence
  Synthetically generated peptide
  VARIANT (1)..(17): Xaa = Any Amino Acid
CCEXYACNPXACXXTGA

SEQ ID NO: 9708 - protein, 17 aa, Artificial Sequence
  Synthetically generated peptide
  VARIANT (1)..(17): Xaa = Any Amino Acid
CCEXYACNPXACXTXGA

SEQ ID NO: 9709 - protein, 17 aa, Artificial Sequence
  Synthetically generated peptide
  VARIANT (1)..(17): Xaa = Any Amino Acid
CCEXYACNPXACXTGXA

SEQ ID NO: 9710 - protein, 16 aa, Artificial Sequence
  Synthetically generated peptide
  VARIANT (1)..(16): Xaa = Any Amino Acid
CCEXYACNPXACTXGA

SEQ ID NO: 9711 - protein, 17 aa, Artificial Sequence
  Synthetically generated peptide
  VARIANT (1)..(17): Xaa = Any Amino Acid
CCEXYACNPXACTXXGA

SEQ ID NO: 9712 - protein, 17 aa, Artificial Sequence
  Synthetically generated peptide
  VARIANT (1)..(17): Xaa = Any Amino Acid
CCEXYACNPXACTXGXA

SEQ ID NO: 9713 - protein, 16 aa, Artificial Sequence
  Synthetically generated peptide
  VARIANT (1)..(16): Xaa = Any Amino Acid
CCEXYACNPXACTGXA

SEQ ID NO: 9714 - protein, 17 aa, Artificial Sequence
  Synthetically generated peptide
  VARIANT (1)..(17): Xaa = Any Amino Acid
CCEXYACNPXACTGXXA

SEQ ID NO: 9715 - protein, 15 aa, Artificial Sequence
  Synthetically generated peptide
  VARIANT (1)..(15): Xaa = Any Amino Acid
CCEXYACNPAXCTGA

SEQ ID NO: 9716 - protein, 16 aa, Artificial Sequence
  Synthetically generated peptide
  VARIANT (1)..(16): Xaa = Any Amino Acid
CCEXYACNPAXXCTGA

SEQ ID NO: 9717 - protein, 17 aa, Artificial Sequence
  Synthetically generated peptide
  VARIANT (1)..(17): Xaa = Any Amino Acid
CCEXYACNPAXXXCTGA

SEQ ID NO: 9718 - protein, 17 aa, Artificial Sequence
  Synthetically generated peptide
  VARIANT (1)..(17): Xaa = Any Amino Acid
CCEXYACNPAXXCXTGA

SEQ ID NO: 9719 - protein, 17 aa, Artificial Sequence
  Synthetically generated peptide
  VARIANT (1)..(17): Xaa = Any Amino Acid
CCEXYACNPAXXCTXGA

SEQ ID NO: 9720 - protein, 17 aa, Artificial Sequence
  Synthetically generated peptide
  VARIANT (1)..(17): Xaa = Any Amino Acid
CCEXYACNPAXXCTGXA

SEQ ID NO: 9721 - protein, 16 aa, Artificial Sequence
  Synthetically generated peptide
  VARIANT (1)..(16): Xaa = Any Amino Acid
CCEXYACNPAXCXTGA

SEQ ID NO: 9722 - protein, 17 aa, Artificial Sequence
  Synthetically generated peptide
  VARIANT (1)..(17): Xaa = Any Amino Acid
CCEXYACNPAXCXXTGA

SEQ ID NO: 9723 - protein, 17 aa, Artificial Sequence
  Synthetically generated peptide
  VARIANT (1)..(17): Xaa = Any Amino Acid
CCEXYACNPAXCXTXGA

SEQ ID NO: 9724 - protein, 17 aa, Artificial Sequence
  Synthetically generated peptide
  VARIANT (1)..(17): Xaa = Any Amino Acid
CCEXYACNPAXCXTGXA

SEQ ID NO: 9725 - protein, 16 aa, Artificial Sequence
  Synthetically generated peptide
  VARIANT (1)..(16): Xaa = Any Amino Acid
CCEXYACNPAXCTXGA

SEQ ID NO: 9726 - protein, 17 aa, Artificial Sequence
  Synthetically generated peptide
  VARIANT (1)..(17): Xaa = Any Amino Acid
CCEXYACNPAXCTXXGA

SEQ ID NO: 9727 - protein, 17 aa, Artificial Sequence
  Synthetically generated peptide
  VARIANT (1)..(17): Xaa = Any Amino Acid
CCEXYACNPAXCTXGXA

SEQ ID NO: 9728 - protein, 16 aa, Artificial Sequence
  Synthetically generated peptide
  VARIANT (1)..(16): Xaa = Any Amino Acid
CCEXYACNPAXCTGXA

SEQ ID NO: 9729 - protein, 17 aa, Artificial Sequence
  Synthetically generated peptide
  VARIANT (1)..(17): Xaa = Any Amino Acid
CCEXYACNPAXCTGXXA

SEQ ID NO: 9730 - protein, 15 aa, Artificial Sequence
  Synthetically generated peptide
  VARIANT (1)..(15): Xaa = Any Amino Acid
CCEXYACNPACXTGA

SEQ ID NO: 9731 - protein, 16 aa, Artificial Sequence
  Synthetically generated peptide
  VARIANT (1)..(16): Xaa = Any Amino Acid
CCEXYACNPACXXTGA

SEQ ID NO: 9732 - protein, 17 aa, Artificial Sequence
  Synthetically generated peptide
  VARIANT (1)..(17): Xaa = Any Amino Acid
CCEXYACNPACXXXTGA

SEQ ID NO: 9733 - protein, 17 aa, Artificial Sequence
  Synthetically generated peptide
  VARIANT (1)..(17): Xaa = Any Amino Acid
CCEXYACNPACXXTXGA

SEQ ID NO: 9734 - protein, 17 aa, Artificial Sequence
  Synthetically generated peptide
  VARIANT (1)..(17): Xaa = Any Amino Acid
CCEXYACNPACXXTGXA

SEQ ID NO: 9735 - protein, 16 aa, Artificial Sequence
  Synthetically generated peptide
  VARIANT (1)..(16): Xaa = Any Amino Acid
CCEXYACNPACXTXGA

SEQ ID NO: 9736 - protein, 17 aa, Artificial Sequence
  Synthetically generated peptide
  VARIANT (1)..(17): Xaa = Any Amino Acid
CCEXYACNPACXTXXGA

SEQ ID NO: 9737 - protein, 17 aa, Artificial Sequence
  Synthetically generated peptide
  VARIANT (1)..(17): Xaa = Any Amino Acid
CCEXYACNPACXTXGXA

SEQ ID NO: 9738 - protein, 16 aa, Artificial Sequence
  Synthetically generated peptide
  VARIANT (1)..(16): Xaa = Any Amino Acid
CCEXYACNPACXTGXA

SEQ ID NO: 9739 - protein, 17 aa, Artificial Sequence
  Synthetically generated peptide
  VARIANT (1)..(17): Xaa = Any Amino Acid
CCEXYACNPACXTGXXA

SEQ ID NO: 9740 - protein, 15 aa, Artificial Sequence
  Synthetically generated peptide
  VARIANT (1)..(15): Xaa = Any Amino Acid
CCEXYACNPACTXGA

SEQ ID NO: 9741 - protein, 16 aa, Artificial Sequence
  Synthetically generated peptide
  VARIANT (1)..(16): Xaa = Any Amino Acid
CCEXYACNPACTXXGA

SEQ ID NO: 9742 - protein, 17 aa, Artificial Sequence
  Synthetically generated peptide
  VARIANT (1)..(17): Xaa = Any Amino Acid
CCEXYACNPACTXXXGA

SEQ ID NO: 9743 - protein, 17 aa, Artificial Sequence
  Synthetically generated peptide
  VARIANT (1)..(17): Xaa = Any Amino Acid
CCEXYACNPACTXXGXA

SEQ ID NO: 9744 - protein, 16 aa, Artificial Sequence
  Synthetically generated peptide
  VARIANT (1)..(16): Xaa = Any Amino Acid
CCEXYACNPACTXGXA

SEQ ID NO: 9745 - protein, 17 aa, Artificial Sequence
  Synthetically generated peptide
  VARIANT (1)..(17): Xaa = Any Amino Acid
CCEXYACNPACTXGXXA

SEQ ID NO: 9746 - protein, 15 aa, Artificial Sequence
  Synthetically generated peptide
  VARIANT (1)..(15): Xaa = Any Amino Acid
CCEXYACNPACTGXA

SEQ ID NO: 9747 - protein, 16 aa, Artificial Sequence
  Synthetically generated peptide
  VARIANT (1)..(16): Xaa = Any Amino Acid
CCEXYACNPACTGXXA

SEQ ID NO: 9748 - protein, 17 aa, Artificial Sequence
  Synthetically generated peptide
  VARIANT (1)..(17): Xaa = Any Amino Acid
CCEXYACNPACTGXXXA

SEQ ID NO: 9749 - protein, 14 aa, Artificial Sequence
  Synthetically generated peptide
  VARIANT (1)..(14): Xaa = Any Amino Acid
CCEYXACNPACTGA

SEQ ID NO: 9750 - protein, 15 aa, Artificial Sequence
  Synthetically generated peptide
  VARIANT (1)..(15): Xaa = Any Amino Acid
CCEYXXACNPACTGA

SEQ ID NO: 9751 - protein, 16 aa, Artificial Sequence
  Synthetically generated peptide
  VARIANT (1)..(16): Xaa = Any Amino Acid
CCEYXXXACNPACTGA

SEQ ID NO: 9752 - protein, 17 aa, Artificial Sequence
  Synthetically generated peptide
  VARIANT (1)..(17): Xaa = Any Amino Acid
CCEYXXXXACNPACTGA

SEQ ID NO: 9753 - protein, 17 aa, Artificial Sequence
  Synthetically generated peptide
  VARIANT (1)..(17): Xaa = Any Amino Acid
CCEYXXXACXNPACTGA

SEQ ID NO: 9754 - protein, 17 aa, Artificial Sequence
  Synthetically generated peptide
  VARIANT (1)..(17): Xaa = Any Amino Acid
CCEYXXXACNXPACTGA

SEQ ID NO: 9755 - protein, 17 aa, Artificial Sequence
  Synthetically generated peptide
  VARIANT (1)..(17): Xaa = Any Amino Acid
CCEYXXXACNPXACTGA

SEQ ID NO: 9756 - protein, 17 aa, Artificial Sequence
  Synthetically generated peptide
  VARIANT (1)..(17): Xaa = Any Amino Acid
CCEYXXXACNPAXCTGA

SEQ ID NO: 9757 - protein, 17 aa, Artificial Sequence
  Synthetically generated peptide
  VARIANT (1)..(17): Xaa = Any Amino Acid
CCEYXXXACNPACXTGA

SEQ ID NO: 9758 - protein, 17 aa, Artificial Sequence
  Synthetically generated peptide
  VARIANT (1)..(17): Xaa = Any Amino Acid
CCEYXXXACNPACTXGA

SEQ ID NO: 9759 - protein, 17 aa, Artificial Sequence
  Synthetically generated peptide
  VARIANT (1)..(17): Xaa = Any Amino Acid
CCEYXXXACNPACTGXA

SEQ ID NO: 9760 - protein, 16 aa, Artificial Sequence
  Synthetically generated peptide
  VARIANT (1)..(16): Xaa = Any Amino Acid
CCEYXXACXNPACTGA

SEQ ID NO: 9761 - protein, 17 aa, Artificial Sequence
  Synthetically generated peptide
  VARIANT (1)..(17): Xaa = Any Amino Acid
CCEYXXACXXNPACTGA

SEQ ID NO: 9762 - protein, 17 aa, Artificial Sequence
  Synthetically generated peptide
  VARIANT (1)..(17): Xaa = Any Amino Acid
CCEYXXACXNXPACTGA

SEQ ID NO: 9763 - protein, 17 aa, Artificial Sequence
  Synthetically generated peptide
  VARIANT (1)..(17): Xaa = Any Amino Acid
CCEYXXACXNPXACTGA

SEQ ID NO: 9764 - protein, 17 aa, Artificial Sequence
  Synthetically generated peptide
  VARIANT (1)..(17): Xaa = Any Amino Acid
CCEYXXACXNPAXCTGA

SEQ ID NO: 9765 - protein, 17 aa, Artificial Sequence
  Synthetically generated peptide
  VARIANT (1)..(17): Xaa = Any Amino Acid
CCEYXXACXNPACXTGA

SEQ ID NO: 9766 - protein, 17 aa, Artificial Sequence
  Synthetically generated peptide
  VARIANT (1)..(17): Xaa = Any Amino Acid
CCEYXXACXNPACTXGA

SEQ ID NO: 9767 - protein, 17 aa, Artificial Sequence
  Synthetically generated peptide
  VARIANT (1)..(17): Xaa = Any Amino Acid
CCEYXXACXNPACTGXA

SEQ ID NO: 9768 - protein, 16 aa, Artificial Sequence
  Synthetically generated peptide
  VARIANT (1)..(16): Xaa = Any Amino Acid
CCEYXXACNXPACTGA

SEQ ID NO: 9769 - protein, 17 aa, Artificial Sequence
  Synthetically generated peptide
  VARIANT (1)..(17): Xaa = Any Amino Acid
CCEYXXACNXXPACTGA

SEQ ID NO: 9770 - protein, 17 aa, Artificial Sequence
  Synthetically generated peptide
  VARIANT (1)..(17): Xaa = Any Amino Acid
CCEYXXACNXPXACTGA

SEQ ID NO: 9771 - protein, 17 aa, Artificial Sequence
  Synthetically generated peptide
  VARIANT (1)..(17): Xaa = Any Amino Acid
CCEYXXACNXPAXCTGA

SEQ ID NO: 9772 - protein, 17 aa, Artificial Sequence
  Synthetically generated peptide
  VARIANT (1)..(17): Xaa = Any Amino Acid
CCEYXXACNXPACXTGA

SEQ ID NO: 9773 - protein, 17 aa, Artificial Sequence
  Synthetically generated peptide
  VARIANT (1)..(17): Xaa = Any Amino Acid
CCEYXXACNXPACTXGA

SEQ ID NO: 9774 - protein, 17 aa, Artificial Sequence
  Synthetically generated peptide
  VARIANT (1)..(17): Xaa = Any Amino Acid
CCEYXXACNXPACTGXA

SEQ ID NO: 9775 - protein, 16 aa, Artificial Sequence
  Synthetically generated peptide
  VARIANT (1)..(16): Xaa = Any Amino Acid
CCEYXXACNPXACTGA

SEQ ID NO: 9776 - protein, 17 aa, Artificial Sequence
  Synthetically generated peptide
  VARIANT (1)..(17): Xaa = Any Amino Acid
CCEYXXACNPXXACTGA

SEQ ID NO: 9777 - protein, 17 aa, Artificial Sequence
  Synthetically generated peptide
  VARIANT (1)..(17): Xaa = Any Amino Acid
CCEYXXACNPXAXCTGA

SEQ ID NO: 9778 - protein, 17 aa, Artificial Sequence
  Synthetically generated peptide
  VARIANT (1)..(17): Xaa = Any Amino Acid
CCEYXXACNPXACXTGA

SEQ ID NO: 9779 - protein, 17 aa, Artificial Sequence
  Synthetically generated peptide
  VARIANT (1)..(17): Xaa = Any Amino Acid
CCEYXXACNPXACTXGA

SEQ ID NO: 9780 - protein, 17 aa, Artificial Sequence
  Synthetically generated peptide
  VARIANT (1)..(17): Xaa = Any Amino Acid
CCEYXXACNPXACTGXA

SEQ ID NO: 9781 - protein, 16 aa, Artificial Sequence
  Synthetically generated peptide
  VARIANT (1)..(16): Xaa = Any Amino Acid
CCEYXXACNPAXCTGA

SEQ ID NO: 9782 - protein, 17 aa, Artificial Sequence
  Synthetically generated peptide
  VARIANT (1)..(17): Xaa = Any Amino Acid
CCEYXXACNPAXXCTGA

SEQ ID NO: 9783 - protein, 17 aa, Artificial Sequence
  Synthetically generated peptide
  VARIANT (1)..(17): Xaa = Any Amino Acid
CCEYXXACNPAXCXTGA

SEQ ID NO: 9784 - protein, 17 aa, Artificial Sequence
  Synthetically generated peptide
  VARIANT (1)..(17): Xaa = Any Amino Acid
CCEYXXACNPAXCTXGA

SEQ ID NO: 9785 - protein, 17 aa, Artificial Sequence
  Synthetically generated peptide
  VARIANT (1)..(17): Xaa = Any Amino Acid
CCEYXXACNPAXCTGXA

SEQ ID NO: 9786 - protein, 16 aa, Artificial Sequence
  Synthetically generated peptide
  VARIANT (1)..(16): Xaa = Any Amino Acid
CCEYXXACNPACXTGA

SEQ ID NO: 9787 - protein, 17 aa, Artificial Sequence
  Synthetically generated peptide
  VARIANT (1)..(17): Xaa = Any Amino Acid
CCEYXXACNPACXXTGA

SEQ ID NO: 9788 - protein, 17 aa, Artificial Sequence
  Synthetically generated peptide
  VARIANT (1)..(17): Xaa = Any Amino Acid
CCEYXXACNPACXTXGA

SEQ ID NO: 9789 - protein, 17 aa, Artificial Sequence
  Synthetically generated peptide
  VARIANT (1)..(17): Xaa = Any Amino Acid
CCEYXXACNPACXTGXA

SEQ ID NO: 9790 - protein, 16 aa, Artificial Sequence
  Synthetically generated peptide
  VARIANT (1)..(16): Xaa = Any Amino Acid
CCEYXXACNPACTXGA

SEQ ID NO: 9791 - protein, 17 aa, Artificial Sequence
  Synthetically generated peptide
  VARIANT (1)..(17): Xaa = Any Amino Acid
CCEYXXACNPACTXXGA

SEQ ID NO: 9792 - protein, 17 aa, Artificial Sequence
  Synthetically generated peptide
  VARIANT (1)..(17): Xaa = Any Amino Acid
CCEYXXACNPACTXGXA

SEQ ID NO: 9793 - protein, 16 aa, Artificial Sequence
  Synthetically generated peptide
  VARIANT (1)..(16): Xaa = Any Amino Acid
CCEYXXACNPACTGXA

SEQ ID NO: 9794 - protein, 17 aa, Artificial Sequence
  Synthetically generated peptide
  VARIANT (1)..(17): Xaa = Any Amino Acid
CCEYXXACNPACTGXXA

SEQ ID NO: 9795 - protein, 15 aa, Artificial Sequence
  Synthetically generated peptide
  VARIANT (1)..(15): Xaa = Any Amino Acid
CCEYXACXNPACTGA

SEQ ID NO: 9796 - protein, 16 aa, Artificial Sequence
  Synthetically generated peptide
  VARIANT (1)..(16): Xaa = Any Amino Acid
CCEYXACXXNPACTGA

SEQ ID NO: 9797 - protein, 17 aa, Artificial Sequence
  Synthetically generated peptide
  VARIANT (1)..(17): Xaa = Any Amino Acid
CCEYXACXXXNPACTGA

SEQ ID NO: 9798 - protein, 17 aa, Artificial Sequence
  Synthetically generated peptide
  VARIANT (1)..(17): Xaa = Any Amino Acid
CCEYXACXXNXPACTGA

SEQ ID NO: 9799 - protein, 17 aa, Artificial Sequence
  Synthetically generated peptide
  VARIANT (1)..(17): Xaa = Any Amino Acid
CCEYXACXXNPXACTGA

SEQ ID NO: 9800 - protein, 17 aa, Artificial Sequence
  Synthetically generated peptide
  VARIANT (1)..(17): Xaa = Any Amino Acid
CCEYXACXXNPAXCTGA

SEQ ID NO: 9801 - protein, 17 aa, Artificial Sequence
  Synthetically generated peptide
  VARIANT (1)..(17): Xaa = Any Amino Acid
CCEYXACXXNPACXTGA

SEQ ID NO: 9802 - protein, 17 aa, Artificial Sequence
  Synthetically generated peptide
  VARIANT (1)..(17): Xaa = Any Amino Acid
CCEYXACXXNPACTXGA

SEQ ID NO: 9803 - protein, 17 aa, Artificial Sequence
  Synthetically generated peptide
  VARIANT (1)..(17): Xaa = Any Amino Acid
CCEYXACXXNPACTGXA

SEQ ID NO: 9804 - protein, 16 aa, Artificial Sequence
  Synthetically generated peptide
  VARIANT (1)..(16): Xaa = Any Amino Acid
CCEYXACXNXPACTGA

SEQ ID NO: 9805 - protein, 17 aa, Artificial Sequence
  Synthetically generated peptide
  VARIANT (1)..(17): Xaa = Any Amino Acid
CCEYXACXNXXPACTGA

SEQ ID NO: 9806 - protein, 17 aa, Artificial Sequence
  Synthetically generated peptide
  VARIANT (1)..(17): Xaa = Any Amino Acid
CCEYXACXNXPXACTGA

SEQ ID NO: 9807 - protein, 17 aa, Artificial Sequence
  Synthetically generated peptide
  VARIANT (1)..(17): Xaa = Any Amino Acid
CCEYXACXNXPAXCTGA

SEQ ID NO: 9808 - protein, 17 aa, Artificial Sequence
  Synthetically generated peptide
  VARIANT (1)..(17): Xaa = Any Amino Acid
CCEYXACXNXPACXTGA

SEQ ID NO: 9809 - protein, 17 aa, Artificial Sequence
  Synthetically generated peptide
  VARIANT (1)..(17): Xaa = Any Amino Acid
CCEYXACXNXPACTXGA

SEQ ID NO: 9810 - protein, 17 aa, Artificial Sequence
  Synthetically generated peptide
  VARIANT (1)..(17): Xaa = Any Amino Acid
CCEYXACXNXPACTGXA

SEQ ID NO: 9811 - protein, 16 aa, Artificial Sequence
  Synthetically generated peptide
  VARIANT (1)..(16): Xaa = Any Amino Acid
CCEYXACXNPXACTGA

SEQ ID NO: 9812 - protein, 17 aa, Artificial Sequence
  Synthetically generated peptide
  VARIANT (1)..(17): Xaa = Any Amino Acid
CCEYXACXNPXXACTGA

SEQ ID NO: 9813 - protein, 17 aa, Artificial Sequence
  Synthetically generated peptide
  VARIANT (1)..(17): Xaa = Any Amino Acid
CCEYXACXNPXAXCTGA

SEQ ID NO: 9814 - protein, 17 aa, Artificial Sequence
  Synthetically generated peptide
  VARIANT (1)..(17): Xaa = Any Amino Acid
CCEYXACXNPXACXTGA

SEQ ID NO: 9815 - protein, 17 aa, Artificial Sequence
  Synthetically generated peptide
  VARIANT (1)..(17): Xaa = Any Amino Acid
CCEYXACXNPXACTXGA

SEQ ID NO: 9816 - protein, 17 aa, Artificial Sequence
  Synthetically generated peptide
  VARIANT (1)..(17): Xaa = Any Amino Acid
CCEYXACXNPXACTGXA

SEQ ID NO: 9817 - protein, 16 aa, Artificial Sequence
  Synthetically generated peptide
  VARIANT (1)..(16): Xaa = Any Amino Acid
CCEYXACXNPAXCTGA

SEQ ID NO: 9818 - protein, 17 aa, Artificial Sequence
  Synthetically generated peptide
  VARIANT (1)..(17): Xaa = Any Amino Acid
CCEYXACXNPAXXCTGA

SEQ ID NO: 9819 - protein, 17 aa, Artificial Sequence
  Synthetically generated peptide
  VARIANT (1)..(17): Xaa = Any Amino Acid
CCEYXACXNPAXCXTGA

SEQ ID NO: 9820 - protein, 17 aa, Artificial Sequence
  Synthetically generated peptide
  VARIANT (1)..(17): Xaa = Any Amino Acid
CCEYXACXNPAXCTXGA

SEQ ID NO: 9821 - protein, 17 aa, Artificial Sequence
  Synthetically generated peptide
  VARIANT (1)..(17): Xaa = Any Amino Acid
CCEYXACXNPAXCTGXA

SEQ ID NO: 9822 - protein, 16 aa, Artificial Sequence
  Synthetically generated peptide
  VARIANT (1)..(16): Xaa = Any Amino Acid
CCEYXACXNPACXTGA

SEQ ID NO: 9823 - protein, 17 aa, Artificial Sequence
  Synthetically generated peptide
  VARIANT (1)..(17): Xaa = Any Amino Acid
CCEYXACXNPACXXTGA

SEQ ID NO: 9824 - protein, 17 aa, Artificial Sequence
  Synthetically generated peptide
  VARIANT (1)..(17): Xaa = Any Amino Acid
CCEYXACXNPACXTXGA

SEQ ID NO: 9825 - protein, 17 aa, Artificial Sequence
  Synthetically generated peptide
  VARIANT (1)..(17): Xaa = Any Amino Acid
CCEYXACXNPACXTGXA

SEQ ID NO: 9826 - protein, 16 aa, Artificial Sequence
  Synthetically generated peptide
  VARIANT (1)..(16): Xaa = Any Amino Acid
CCEYXACXNPACTXGA

SEQ ID NO: 9827 - protein, 17 aa, Artificial Sequence
  Synthetically generated peptide
  VARIANT (1)..(17): Xaa = Any Amino Acid
CCEYXACXNPACTXXGA

SEQ ID NO: 9828 - protein, 17 aa, Artificial Sequence
  Synthetically generated peptide
  VARIANT (1)..(17): Xaa = Any Amino Acid
CCEYXACXNPACTXGXA

SEQ ID NO: 9829 - protein, 16 aa, Artificial Sequence
  Synthetically generated peptide
  VARIANT (1)..(16): Xaa = Any Amino Acid
CCEYXACXNPACTGXA

SEQ ID NO: 9830 - protein, 17 aa, Artificial Sequence
  Synthetically generated peptide
  VARIANT (1)..(17): Xaa = Any Amino Acid
CCEYXACXNPACTGXXA

SEQ ID NO: 9831 - protein, 15 aa, Artificial Sequence
  Synthetically generated peptide
  VARIANT (1)..(15): Xaa = Any Amino Acid
CCEYXACNXPACTGA

SEQ ID NO: 9832 - protein, 16 aa, Artificial Sequence
  Synthetically generated peptide
  VARIANT (1)..(16): Xaa = Any Amino Acid
CCEYXACNXXPACTGA

SEQ ID NO: 9833 - protein, 17 aa, Artificial Sequence
  Synthetically generated peptide
  VARIANT (1)..(17): Xaa = Any Amino Acid
CCEYXACNXXXPACTGA

SEQ ID NO: 9834 - protein, 17 aa, Artificial Sequence
  Synthetically generated peptide
  VARIANT (1)..(17): Xaa = Any Amino Acid
CCEYXACNXXPXACTGA

SEQ ID NO: 9835 - protein, 17 aa, Artificial Sequence
  Synthetically generated peptide
  VARIANT (1)..(17): Xaa = Any Amino Acid
CCEYXACNXXPAXCTGA

SEQ ID NO: 9836 - protein, 17 aa, Artificial Sequence
  Synthetically generated peptide
  VARIANT (1)..(17): Xaa = Any Amino Acid
CCEYXACNXXPACXTGA

SEQ ID NO: 9837 - protein, 17 aa, Artificial Sequence
  Synthetically generated peptide
  VARIANT (1)..(17): Xaa = Any Amino Acid
CCEYXACNXXPACTXGA

SEQ ID NO: 9838 - protein, 17 aa, Artificial Sequence
  Synthetically generated peptide
  VARIANT (1)..(17): Xaa = Any Amino Acid
CCEYXACNXXPACTGXA

SEQ ID NO: 9839 - protein, 16 aa, Artificial Sequence
  Synthetically generated peptide
  VARIANT (1)..(16): Xaa = Any Amino Acid
CCEYXACNXPXACTGA

SEQ ID NO: 9840 - protein, 17 aa, Artificial Sequence
  Synthetically generated peptide
  VARIANT (1)..(17): Xaa = Any Amino Acid
CCEYXACNXPXXACTGA

SEQ ID NO: 9841 - protein, 17 aa, Artificial Sequence
  Synthetically generated peptide
  VARIANT (1)..(17): Xaa = Any Amino Acid
CCEYXACNXPXAXCTGA

SEQ ID NO: 9842 - protein, 17 aa, Artificial Sequence
  Synthetically generated peptide
  VARIANT (1)..(17): Xaa = Any Amino Acid
CCEYXACNXPXACXTGA

SEQ ID NO: 9843 - protein, 17 aa, Artificial Sequence
  Synthetically generated peptide
  VARIANT (1)..(17): Xaa = Any Amino Acid
CCEYXACNXPXACTXGA

SEQ ID NO: 9844 - protein, 17 aa, Artificial Sequence
  Synthetically generated peptide
  VARIANT (1)..(17): Xaa = Any Amino Acid
CCEYXACNXPXACTGXA

SEQ ID NO: 9845 - protein, 16 aa, Artificial Sequence
  Synthetically generated peptide
  VARIANT (1)..(16): Xaa = Any Amino Acid
CCEYXACNXPAXCTGA

SEQ ID NO: 9846 - protein, 17 aa, Artificial Sequence
  Synthetically generated peptide
  VARIANT (1)..(17): Xaa = Any Amino Acid
CCEYXACNXPAXXCTGA

SEQ ID NO: 9847 - protein, 17 aa, Artificial Sequence
  Synthetically generated peptide
  VARIANT (1)..(17): Xaa = Any Amino Acid
CCEYXACNXPAXCXTGA

SEQ ID NO: 9848 - protein, 17 aa, Artificial Sequence
  Synthetically generated peptide
  VARIANT (1)..(17): Xaa = Any Amino Acid
CCEYXACNXPAXCTXGA

SEQ ID NO: 9849 - protein, 17 aa, Artificial Sequence
  Synthetically generated peptide
  VARIANT (1)..(17): Xaa = Any Amino Acid
CCEYXACNXPAXCTGXA

SEQ ID NO: 9850 - protein, 16 aa, Artificial Sequence
  Synthetically generated peptide
  VARIANT (1)..(16): Xaa = Any Amino Acid
CCEYXACNXPACXTGA

SEQ ID NO: 9851 - protein, 17 aa, Artificial Sequence
  Synthetically generated peptide
  VARIANT (1)..(17): Xaa = Any Amino Acid
CCEYXACNXPACXXTGA

SEQ ID NO: 9852 - protein, 17 aa, Artificial Sequence
  Synthetically generated peptide
  VARIANT (1)..(17): Xaa = Any Amino Acid
CCEYXACNXPACXTXGA

SEQ ID NO: 9853 - protein, 17 aa, Artificial Sequence
  Synthetically generated peptide
  VARIANT (1)..(17): Xaa = Any Amino Acid
CCEYXACNXPACXTGXA

SEQ ID NO: 9854 - protein, 16 aa, Artificial Sequence
  Synthetically generated peptide
  VARIANT (1)..(16): Xaa = Any Amino Acid
CCEYXACNXPACTXGA

SEQ ID NO: 9855 - protein, 17 aa, Artificial Sequence
  Synthetically generated peptide
  VARIANT (1)..(17): Xaa = Any Amino Acid
CCEYXACNXPACTXXGA

SEQ ID NO: 9856 - protein, 17 aa, Artificial Sequence
  Synthetically generated peptide
  VARIANT (1)..(17): Xaa = Any Amino Acid
CCEYXACNXPACTXGXA

SEQ ID NO: 9857 - protein, 16 aa, Artificial Sequence
  Synthetically generated peptide
  VARIANT (1)..(16): Xaa = Any Amino Acid
CCEYXACNXPACTGXA

SEQ ID NO: 9858 - protein, 17 aa, Artificial Sequence
  Synthetically generated peptide
  VARIANT (1)..(17): Xaa = Any Amino Acid
CCEYXACNXPACTGXXA

SEQ ID NO: 9859 - protein, 15 aa, Artificial Sequence
  Synthetically generated peptide
  VARIANT (1)..(15): Xaa = Any Amino Acid
CCEYXACNPXACTGA

SEQ ID NO: 9860 - protein, 16 aa, Artificial Sequence
  Synthetically generated peptide
  VARIANT (1)..(16): Xaa = Any Amino Acid
CCEYXACNPXXACTGA

SEQ ID NO: 9861 - protein, 17 aa, Artificial Sequence
  Synthetically generated peptide
  VARIANT (1)..(17): Xaa = Any Amino Acid
CCEYXACNPXXXACTGA

SEQ ID NO: 9862 - protein, 17 aa, Artificial Sequence
  Synthetically generated peptide
  VARIANT (1)..(17): Xaa = Any Amino Acid
CCEYXACNPXXAXCTGA

SEQ ID NO: 9863 - protein, 17 aa, Artificial Sequence
  Synthetically generated peptide
  VARIANT (1)..(17): Xaa = Any Amino Acid
CCEYXACNPXXACXTGA

SEQ ID NO: 9864 - protein, 17 aa, Artificial Sequence
  Synthetically generated peptide
  VARIANT (1)..(17): Xaa = Any Amino Acid
CCEYXACNPXXACTXGA

SEQ ID NO: 9865 - protein, 17 aa, Artificial Sequence
  Synthetically generated peptide
  VARIANT (1)..(17): Xaa = Any Amino Acid
CCEYXACNPXXACTGXA

SEQ ID NO: 9866 - protein, 16 aa, Artificial Sequence
  Synthetically generated peptide
  VARIANT (1)..(16): Xaa = Any Amino Acid
CCEYXACNPXAXCTGA

SEQ ID NO: 9867 - protein, 17 aa, Artificial Sequence
  Synthetically generated peptide
  VARIANT (1)..(17): Xaa = Any Amino Acid
CCEYXACNPXAXXCTGA

SEQ ID NO: 9868 - protein, 17 aa, Artificial Sequence
  Synthetically generated peptide
  VARIANT (1)..(17): Xaa = Any Amino Acid
CCEYXACNPXAXCXTGA

SEQ ID NO: 9869 - protein, 17 aa, Artificial Sequence
  Synthetically generated peptide
  VARIANT (1)..(17): Xaa = Any Amino Acid
CCEYXACNPXAXCTXGA

SEQ ID NO: 9870 - protein, 17 aa, Artificial Sequence
  Synthetically generated peptide
  VARIANT (1)..(17): Xaa = Any Amino Acid
CCEYXACNPXAXCTGXA

SEQ ID NO: 9871 - protein, 16 aa, Artificial Sequence
  Synthetically generated peptide
  VARIANT (1)..(16): Xaa = Any Amino Acid
CCEYXACNPXACXTGA

SEQ ID NO: 9872 - protein, 17 aa, Artificial Sequence
  Synthetically generated peptide
  VARIANT (1)..(17): Xaa = Any Amino Acid
CCEYXACNPXACXXTGA

SEQ ID NO: 9873 - protein, 17 aa, Artificial Sequence
  Synthetically generated peptide
  VARIANT (1)..(17): Xaa = Any Amino Acid
CCEYXACNPXACXTXGA

SEQ ID NO: 9874 - protein, 17 aa, Artificial Sequence
  Synthetically generated peptide
  VARIANT (1)..(17): Xaa = Any Amino Acid
CCEYXACNPXACXTGXA

SEQ ID NO: 9875 - protein, 16 aa, Artificial Sequence
  Synthetically generated peptide
  VARIANT (1)..(16): Xaa = Any Amino Acid
CCEYXACNPXACTXGA

SEQ ID NO: 9876 - protein, 17 aa, Artificial Sequence
  Synthetically generated peptide
  VARIANT (1)..(17): Xaa = Any Amino Acid
CCEYXACNPXACTXXGA

SEQ ID NO: 9877 - protein, 17 aa, Artificial Sequence
  Synthetically generated peptide
  VARIANT (1)..(17): Xaa = Any Amino Acid
CCEYXACNPXACTXGXA

SEQ ID NO: 9878 - protein, 16 aa, Artificial Sequence
  Synthetically generated peptide
  VARIANT (1)..(16): Xaa = Any Amino Acid
CCEYXACNPXACTGXA

SEQ ID NO: 9879 - protein, 17 aa, Artificial Sequence
  Synthetically generated peptide
  VARIANT (1)..(17): Xaa = Any Amino Acid
CCEYXACNPXACTGXXA

SEQ ID NO: 9880 - protein, 15 aa, Artificial Sequence
  Synthetically generated peptide
  VARIANT (1)..(15): Xaa = Any Amino Acid
CCEYXACNPAXCTGA

SEQ ID NO: 9881 - protein, 16 aa, Artificial Sequence
  Synthetically generated peptide
  VARIANT (1)..(16): Xaa = Any Amino Acid
CCEYXACNPAXXCTGA

SEQ ID NO: 9882 - protein, 17 aa, Artificial Sequence
  Synthetically generated peptide
  VARIANT (1)..(17): Xaa = Any Amino Acid
CCEYXACNPAXXXCTGA

SEQ ID NO: 9883 - protein, 17 aa, Artificial Sequence
  Synthetically generated peptide
  VARIANT (1)..(17): Xaa = Any Amino Acid
CCEYXACNPAXXCXTGA

SEQ ID NO: 9884 - protein, 17 aa, Artificial Sequence
  Synthetically generated peptide
  VARIANT (1)..(17): Xaa = Any Amino Acid
CCEYXACNPAXXCTXGA

SEQ ID NO: 9885 - protein, 17 aa, Artificial Sequence
  Synthetically generated peptide
  VARIANT (1)..(17): Xaa = Any Amino Acid
CCEYXACNPAXXCTGXA

SEQ ID NO: 9886 - protein, 16 aa, Artificial Sequence
  Synthetically generated peptide
  VARIANT (1)..(16): Xaa = Any Amino Acid
CCEYXACNPAXCXTGA

SEQ ID NO: 9887 - protein, 17 aa, Artificial Sequence
  Synthetically generated peptide
  VARIANT (1)..(17): Xaa = Any Amino Acid
CCEYXACNPAXCXXTGA

SEQ ID NO: 9888 - protein, 17 aa, Artificial Sequence
  Synthetically generated peptide
  VARIANT (1)..(17): Xaa = Any Amino Acid
CCEYXACNPAXCXTXGA

SEQ ID NO: 9889 - protein, 17 aa, Artificial Sequence
  Synthetically generated peptide
  VARIANT (1)..(17): Xaa = Any Amino Acid
CCEYXACNPAXCXTGXA

SEQ ID NO: 9890 - protein, 16 aa, Artificial Sequence
  Synthetically generated peptide
  VARIANT (1)..(16): Xaa = Any Amino Acid
CCEYXACNPAXCTXGA

SEQ ID NO: 9891 - protein, 17 aa, Artificial Sequence
  Synthetically generated peptide
  VARIANT (1)..(17): Xaa = Any Amino Acid
CCEYXACNPAXCTXXGA

SEQ ID NO: 9892 - protein, 17 aa, Artificial Sequence
  Synthetically generated peptide
  VARIANT (1)..(17): Xaa = Any Amino Acid
CCEYXACNPAXCTXGXA

SEQ ID NO: 9893 - protein, 16 aa, Artificial Sequence
  Synthetically generated peptide
  VARIANT (1)..(16): Xaa = Any Amino Acid
CCEYXACNPAXCTGXA

SEQ ID NO: 9894 - protein, 17 aa, Artificial Sequence
  Synthetically generated peptide
  VARIANT (1)..(17): Xaa = Any Amino Acid
CCEYXACNPAXCTGXXA

SEQ ID NO: 9895 - protein, 15 aa, Artificial Sequence
  Synthetically generated peptide
  VARIANT (1)..(15): Xaa = Any Amino Acid
CCEYXACNPACXTGA

SEQ ID NO: 9896 - protein, 16 aa, Artificial Sequence
  Synthetically generated peptide
  VARIANT (1)..(16): Xaa = Any Amino Acid
CCEYXACNPACXXTGA

SEQ ID NO: 9897 - protein, 17 aa, Artificial Sequence
  Synthetically generated peptide
  VARIANT (1)..(17): Xaa = Any Amino Acid
CCEYXACNPACXXXTGA

SEQ ID NO: 9898 - protein, 17 aa, Artificial Sequence
  Synthetically generated peptide
  VARIANT (1)..(17): Xaa = Any Amino Acid
CCEYXACNPACXXTXGA

SEQ ID NO: 9899 - protein, 17 aa, Artificial Sequence
  Synthetically generated peptide
  VARIANT (1)..(17): Xaa = Any Amino Acid
CCEYXACNPACXXTGXA

SEQ ID NO: 9900 - protein, 16 aa, Artificial Sequence
  Synthetically generated peptide
  VARIANT (1)..(16): Xaa = Any Amino Acid
CCEYXACNPACXTXGA

SEQ ID NO: 9901 - protein, 17 aa, Artificial Sequence
  Synthetically generated peptide
  VARIANT (1)..(17): Xaa = Any Amino Acid
CCEYXACNPACXTXXGA

SEQ ID NO: 9902 - protein, 17 aa, Artificial Sequence
  Synthetically generated peptide
  VARIANT (1)..(17): Xaa = Any Amino Acid
CCEYXACNPACXTXGXA

SEQ ID NO: 9903 - protein, 16 aa, Artificial Sequence
  Synthetically generated peptide
  VARIANT (1)..(16): Xaa = Any Amino Acid
CCEYXACNPACXTGXA

SEQ ID NO: 9904 - protein, 17 aa, Artificial Sequence
  Synthetically generated peptide
  VARIANT (1)..(17): Xaa = Any Amino Acid
CCEYXACNPACXTGXXA

SEQ ID NO: 9905 - protein, 15 aa, Artificial Sequence
  Synthetically generated peptide
  VARIANT (1)..(15): Xaa = Any Amino Acid
CCEYXACNPACTXGA

SEQ ID NO: 9906 - protein, 16 aa, Artificial Sequence
  Synthetically generated peptide
  VARIANT (1)..(16): Xaa = Any Amino Acid
CCEYXACNPACTXXGA

SEQ ID NO: 9907 - protein, 17 aa, Artificial Sequence
  Synthetically generated peptide
  VARIANT (1)..(17): Xaa = Any Amino Acid
CCEYXACNPACTXXXGA

SEQ ID NO: 9908 - protein, 17 aa, Artificial Sequence
  Synthetically generated peptide
  VARIANT (1)..(17): Xaa = Any Amino Acid
CCEYXACNPACTXXGXA

SEQ ID NO: 9909 - protein, 16 aa, Artificial Sequence
  Synthetically generated peptide
  VARIANT (1)..(16): Xaa = Any Amino Acid
CCEYXACNPACTXGXA

SEQ ID NO: 9910 - protein, 17 aa, Artificial Sequence
  Synthetically generated peptide
  VARIANT (1)..(17): Xaa = Any Amino Acid
CCEYXACNPACTXGXXA

SEQ ID NO: 9911 - protein, 15 aa, Artificial Sequence
  Synthetically generated peptide
  VARIANT (1)..(15): Xaa = Any Amino Acid
CCEYXACNPACTGXA

SEQ ID NO: 9912 - protein, 16 aa, Artificial Sequence
  Synthetically generated peptide
  VARIANT (1)..(16): Xaa = Any Amino Acid
CCEYXACNPACTGXXA

SEQ ID NO: 9913 - protein, 17 aa, Artificial Sequence
  Synthetically generated peptide
  VARIANT (1)..(17): Xaa = Any Amino Acid
CCEYXACNPACTGXXXA

SEQ ID NO: 9914 - protein, 14 aa, Artificial Sequence
  Synthetically generated peptide
  VARIANT (1)..(14): Xaa = Any Amino Acid
CCEYACXNPACTGA

SEQ ID NO: 9915 - protein, 15 aa, Artificial Sequence
  Synthetically generated peptide
  VARIANT (1)..(15): Xaa = Any Amino Acid
CCEYACXXNPACTGA

SEQ ID NO: 9916 - protein, 16 aa, Artificial Sequence
  Synthetically generated peptide
  VARIANT (1)..(16): Xaa = Any Amino Acid
CCEYACXXXNPACTGA

SEQ ID NO: 9917 - protein, 17 aa, Artificial Sequence
  Synthetically generated peptide
  VARIANT (1)..(17): Xaa = Any Amino Acid
CCEYACXXXXNPACTGA

SEQ ID NO: 9918 - protein, 17 aa, Artificial Sequence
  Synthetically generated peptide
  VARIANT (1)..(17): Xaa = Any Amino Acid
CCEYACXXXNXPACTGA

SEQ ID NO: 9919 - protein, 17 aa, Artificial Sequence
  Synthetically generated peptide
  VARIANT (1)..(17): Xaa = Any Amino Acid
CCEYACXXXNPXACTGA

SEQ ID NO: 9920 - protein, 17 aa, Artificial Sequence
  Synthetically generated peptide
  VARIANT (1)..(17): Xaa = Any Amino Acid
CCEYACXXXNPAXCTGA

SEQ ID NO: 9921 - protein, 17 aa, Artificial Sequence
  Synthetically generated peptide
  VARIANT (1)..(17): Xaa = Any Amino Acid
CCEYACXXXNPACXTGA

SEQ ID NO: 9922 - protein, 17 aa, Artificial Sequence
  Synthetically generated peptide
  VARIANT (1)..(17): Xaa = Any Amino Acid
CCEYACXXXNPACTXGA

SEQ ID NO: 9923 - protein, 17 aa, Artificial Sequence
  Synthetically generated peptide
  VARIANT (1)..(17): Xaa = Any Amino Acid
CCEYACXXXNPACTGXA

SEQ ID NO: 9924 - protein, 16 aa, Artificial Sequence
  Synthetically generated peptide
  VARIANT (1)..(16): Xaa = Any Amino Acid
CCEYACXXNXPACTGA

SEQ ID NO: 9925 - protein, 17 aa, Artificial Sequence
  Synthetically generated peptide
  VARIANT (1)..(17): Xaa = Any Amino Acid
CCEYACXXNXXPACTGA

SEQ ID NO: 9926 - protein, 17 aa, Artificial Sequence
  Synthetically generated peptide
  VARIANT (1)..(17): Xaa = Any Amino Acid
CCEYACXXNXPXACTGA

SEQ ID NO: 9927 - protein, 17 aa, Artificial Sequence
  Synthetically generated peptide
  VARIANT (1)..(17): Xaa = Any Amino Acid
CCEYACXXNXPAXCTGA

SEQ ID NO: 9928 - protein, 17 aa, Artificial Sequence
  Synthetically generated peptide
  VARIANT (1)..(17): Xaa = Any Amino Acid
CCEYACXXNXPACXTGA

SEQ ID NO: 9929 - protein, 17 aa, Artificial Sequence
  Synthetically generated peptide
  VARIANT (1)..(17): Xaa = Any Amino Acid
CCEYACXXNXPACTXGA

SEQ ID NO: 9930 - protein, 17 aa, Artificial Sequence
  Synthetically generated peptide
  VARIANT (1)..(17): Xaa = Any Amino Acid
CCEYACXXNXPACTGXA

SEQ ID NO: 9931 - protein, 16 aa, Artificial Sequence
  Synthetically generated peptide
  VARIANT (1)..(16): Xaa = Any Amino Acid
CCEYACXXNPXACTGA

SEQ ID NO: 9932 - protein, 17 aa, Artificial Sequence
  Synthetically generated peptide
  VARIANT (1)..(17): Xaa = Any Amino Acid
CCEYACXXNPXXACTGA

SEQ ID NO: 9933 - protein, 17 aa, Artificial Sequence
  Synthetically generated peptide
  VARIANT (1)..(17): Xaa = Any Amino Acid
CCEYACXXNPXAXCTGA

SEQ ID NO: 9934 - protein, 17 aa, Artificial Sequence
  Synthetically generated peptide
  VARIANT (1)..(17): Xaa = Any Amino Acid
CCEYACXXNPXACXTGA

SEQ ID NO: 9935 - protein, 17 aa, Artificial Sequence
  Synthetically generated peptide
  VARIANT (1)..(17): Xaa = Any Amino Acid
CCEYACXXNPXACTXGA

SEQ ID NO: 9936 - protein, 17 aa, Artificial Sequence
  Synthetically generated peptide
  VARIANT (1)..(17): Xaa = Any Amino Acid
CCEYACXXNPXACTGXA

SEQ ID NO: 9937 - protein, 16 aa, Artificial Sequence
  Synthetically generated peptide
  VARIANT (1)..(16): Xaa = Any Amino Acid
CCEYACXXNPAXCTGA

SEQ ID NO: 9938 - protein, 17 aa, Artificial Sequence
  Synthetically generated peptide
  VARIANT (1)..(17): Xaa = Any Amino Acid
CCEYACXXNPAXXCTGA

SEQ ID NO: 9939 - protein, 17 aa, Artificial Sequence
  Synthetically generated peptide
  VARIANT (1)..(17): Xaa = Any Amino Acid
CCEYACXXNPAXCXTGA

SEQ ID NO: 9940 - protein, 17 aa, Artificial Sequence
  Synthetically generated peptide
  VARIANT (1)..(17): Xaa = Any Amino Acid
CCEYACXXNPAXCTXGA

SEQ ID NO: 9941 - protein, 17 aa, Artificial Sequence
  Synthetically generated peptide
  VARIANT (1)..(17): Xaa = Any Amino Acid
CCEYACXXNPAXCTGXA

SEQ ID NO: 9942 - protein, 16 aa, Artificial Sequence
  Synthetically generated peptide
  VARIANT (1)..(16): Xaa = Any Amino Acid
CCEYACXXNPACXTGA

SEQ ID NO: 9943 - protein, 17 aa, Artificial Sequence
  Synthetically generated peptide
  VARIANT (1)..(17): Xaa = Any Amino Acid
CCEYACXXNPACXXTGA

SEQ ID NO: 9944 - protein, 17 aa, Artificial Sequence
  Synthetically generated peptide
  VARIANT (1)..(17): Xaa = Any Amino Acid
CCEYACXXNPACXTXGA

SEQ ID NO: 9945 - protein, 17 aa, Artificial Sequence
  Synthetically generated peptide
  VARIANT (1)..(17): Xaa = Any Amino Acid
CCEYACXXNPACXTGXA

SEQ ID NO: 9946 - protein, 16 aa, Artificial Sequence
  Synthetically generated peptide
  VARIANT (1)..(16): Xaa = Any Amino Acid
CCEYACXXNPACTXGA

SEQ ID NO: 9947 - protein, 17 aa, Artificial Sequence
  Synthetically generated peptide
  VARIANT (1)..(17): Xaa = Any Amino Acid
CCEYACXXNPACTXXGA

SEQ ID NO: 9948 - protein, 17 aa, Artificial Sequence
  Synthetically generated peptide
  VARIANT (1)..(17): Xaa = Any Amino Acid
CCEYACXXNPACTXGXA

SEQ ID NO: 9949 - protein, 16 aa, Artificial Sequence
  Synthetically generated peptide
  VARIANT (1)..(16): Xaa = Any Amino Acid
CCEYACXXNPACTGXA

SEQ ID NO: 9950 - protein, 17 aa, Artificial Sequence
  Synthetically generated peptide
  VARIANT (1)..(17): Xaa = Any Amino Acid
CCEYACXXNPACTGXXA

SEQ ID NO: 9951 - protein, 15 aa, Artificial Sequence
  Synthetically generated peptide
  VARIANT (1)..(15): Xaa = Any Amino Acid
CCEYACXNXPACTGA

SEQ ID NO: 9952 - protein, 16 aa, Artificial Sequence
  Synthetically generated peptide
  VARIANT (1)..(16): Xaa = Any Amino Acid
CCEYACXNXXPACTGA

SEQ ID NO: 9953 - protein, 17 aa, Artificial Sequence
  Synthetically generated peptide
  VARIANT (1)..(17): Xaa = Any Amino Acid
CCEYACXNXXXPACTGA

SEQ ID NO: 9954 - protein, 17 aa, Artificial Sequence
  Synthetically generated peptide
  VARIANT (1)..(17): Xaa = Any Amino Acid
CCEYACXNXXPXACTGA

SEQ ID NO: 9955 - protein, 17 aa, Artificial Sequence
  Synthetically generated peptide
  VARIANT (1)..(17): Xaa = Any Amino Acid
CCEYACXNXXPAXCTGA

SEQ ID NO: 9956 - protein, 17 aa, Artificial Sequence
  Synthetically generated peptide
  VARIANT (1)..(17): Xaa = Any Amino Acid
CCEYACXNXXPACXTGA

SEQ ID NO: 9957 - protein, 17 aa, Artificial Sequence
  Synthetically generated peptide
  VARIANT (1)..(17): Xaa = Any Amino Acid
CCEYACXNXXPACTXGA

SEQ ID NO: 9958 - protein, 17 aa, Artificial Sequence
  Synthetically generated peptide
  VARIANT (1)..(17): Xaa = Any Amino Acid
CCEYACXNXXPACTGXA

SEQ ID NO: 9959 - protein, 16 aa, Artificial Sequence
  Synthetically generated peptide
  VARIANT (1)..(16): Xaa = Any Amino Acid
CCEYACXNXPXACTGA

SEQ ID NO: 9960 - protein, 17 aa, Artificial Sequence
  Synthetically generated peptide
  VARIANT (1)..(17): Xaa = Any Amino Acid
CCEYACXNXPXXACTGA

SEQ ID NO: 9961 - protein, 17 aa, Artificial Sequence
  Synthetically generated peptide
  VARIANT (1)..(17): Xaa = Any Amino Acid
CCEYACXNXPXAXCTGA

SEQ ID NO: 9962 - protein, 17 aa, Artificial Sequence
  Synthetically generated peptide
  VARIANT (1)..(17): Xaa = Any Amino Acid
CCEYACXNXPXACXTGA

SEQ ID NO: 9963 - protein, 17 aa, Artificial Sequence
  Synthetically generated peptide
  VARIANT (1)..(17): Xaa = Any Amino Acid
CCEYACXNXPXACTXGA

SEQ ID NO: 9964 - protein, 17 aa, Artificial Sequence
  Synthetically generated peptide
  VARIANT (1)..(17): Xaa = Any Amino Acid
CCEYACXNXPXACTGXA

SEQ ID NO: 9965 - protein, 16 aa, Artificial Sequence
  Synthetically generated peptide
  VARIANT (1)..(16): Xaa = Any Amino Acid
CCEYACXNXPAXCTGA

SEQ ID NO: 9966 - protein, 17 aa, Artificial Sequence
  Synthetically generated peptide
  VARIANT (1)..(17): Xaa = Any Amino Acid
CCEYACXNXPAXXCTGA

SEQ ID NO: 9967 - protein, 17 aa, Artificial Sequence
  Synthetically generated peptide
  VARIANT (1)..(17): Xaa = Any Amino Acid
CCEYACXNXPAXCXTGA

SEQ ID NO: 9968 - protein, 17 aa, Artificial Sequence
  Synthetically generated peptide
  VARIANT (1)..(17): Xaa = Any Amino Acid
CCEYACXNXPAXCTXGA

SEQ ID NO: 9969 - protein, 17 aa, Artificial Sequence
  Synthetically generated peptide
  VARIANT (1)..(17): Xaa = Any Amino Acid
CCEYACXNXPAXCTGXA

SEQ ID NO: 9970 - protein, 16 aa, Artificial Sequence
  Synthetically generated peptide
  VARIANT (1)..(16): Xaa = Any Amino Acid
CCEYACXNXPACXTGA

SEQ ID NO: 9971 - protein, 17 aa, Artificial Sequence
  Synthetically generated peptide
  VARIANT (1)..(17): Xaa = Any Amino Acid
CCEYACXNXPACXXTGA

SEQ ID NO: 9972 - protein, 17 aa, Artificial Sequence
  Synthetically generated peptide
  VARIANT (1)..(17): Xaa = Any Amino Acid
CCEYACXNXPACXTXGA

SEQ ID NO: 9973 - protein, 17 aa, Artificial Sequence
  Synthetically generated peptide
  VARIANT (1)..(17): Xaa = Any Amino Acid
CCEYACXNXPACXTGXA

SEQ ID NO: 9974 - protein, 16 aa, Artificial Sequence
  Synthetically generated peptide
  VARIANT (1)..(16): Xaa = Any Amino Acid
CCEYACXNXPACTXGA

SEQ ID NO: 9975 - protein, 17 aa, Artificial Sequence
  Synthetically generated peptide
  VARIANT (1)..(17): Xaa = Any Amino Acid
CCEYACXNXPACTXXGA

SEQ ID NO: 9976 - protein, 17 aa, Artificial Sequence
  Synthetically generated peptide
  VARIANT (1)..(17): Xaa = Any Amino Acid
CCEYACXNXPACTXGXA

SEQ ID NO: 9977 - protein, 16 aa, Artificial Sequence
  Synthetically generated peptide
  VARIANT (1)..(16): Xaa = Any Amino Acid
CCEYACXNXPACTGXA

SEQ ID NO: 9978 - protein, 17 aa, Artificial Sequence
  Synthetically generated peptide
  VARIANT (1)..(17): Xaa = Any Amino Acid
CCEYACXNXPACTGXXA

SEQ ID NO: 9979 - protein, 15 aa, Artificial Sequence
  Synthetically generated peptide
  VARIANT (1)..(15): Xaa = Any Amino Acid
CCEYACXNPXACTGA

SEQ ID NO: 9980 - protein, 16 aa, Artificial Sequence
  Synthetically generated peptide
  VARIANT (1)..(16): Xaa = Any Amino Acid
CCEYACXNPXXACTGA

SEQ ID NO: 9981 - protein, 17 aa, Artificial Sequence
  Synthetically generated peptide
  VARIANT (1)..(17): Xaa = Any Amino Acid
CCEYACXNPXXXACTGA

SEQ ID NO: 9982 - protein, 17 aa, Artificial Sequence
  Synthetically generated peptide
  VARIANT (1)..(17): Xaa = Any Amino Acid
CCEYACXNPXXAXCTGA

SEQ ID NO: 9983 - protein, 17 aa, Artificial Sequence
  Synthetically generated peptide
  VARIANT (1)..(17): Xaa = Any Amino Acid
CCEYACXNPXXACXTGA

SEQ ID NO: 9984 - protein, 17 aa, Artificial Sequence
  Synthetically generated peptide
  VARIANT (1)..(17): Xaa = Any Amino Acid
CCEYACXNPXXACTXGA

SEQ ID NO: 9985 - protein, 17 aa, Artificial Sequence
  Synthetically generated peptide
  VARIANT (1)..(17): Xaa = Any Amino Acid
CCEYACXNPXXACTGXA

SEQ ID NO: 9986 - protein, 16 aa, Artificial Sequence
  Synthetically generated peptide
  VARIANT (1)..(16): Xaa = Any Amino Acid
CCEYACXNPXAXCTGA

SEQ ID NO: 9987 - protein, 17 aa, Artificial Sequence
  Synthetically generated peptide
  VARIANT (1)..(17): Xaa = Any Amino Acid
CCEYACXNPXAXXCTGA

SEQ ID NO: 9988 - protein, 17 aa, Artificial Sequence
  Synthetically generated peptide
  VARIANT (1)..(17): Xaa = Any Amino Acid
CCEYACXNPXAXCXTGA

SEQ ID NO: 9989 - protein, 17 aa, Artificial Sequence
  Synthetically generated peptide
  VARIANT (1)..(17): Xaa = Any Amino Acid
CCEYACXNPXAXCTXGA

SEQ ID NO: 9990 - protein, 17 aa, Artificial Sequence
  Synthetically generated peptide
  VARIANT (1)..(17): Xaa = Any Amino Acid
CCEYACXNPXAXCTGXA

SEQ ID NO: 9991 - protein, 16 aa, Artificial Sequence
  Synthetically generated peptide
  VARIANT (1)..(16): Xaa = Any Amino Acid
CCEYACXNPXACXTGA

SEQ ID NO: 9992 - protein, 17 aa, Artificial Sequence
  Synthetically generated peptide
  VARIANT (1)..(17): Xaa = Any Amino Acid
CCEYACXNPXACXXTGA

SEQ ID NO: 9993 - protein, 17 aa, Artificial Sequence
  Synthetically generated peptide
  VARIANT (1)..(17): Xaa = Any Amino Acid
CCEYACXNPXACXTXGA

SEQ ID NO: 9994 - protein, 17 aa, Artificial Sequence
  Synthetically generated peptide
  VARIANT (1)..(17): Xaa = Any Amino Acid
CCEYACXNPXACXTGXA

SEQ ID NO: 9995 - protein, 16 aa, Artificial Sequence
  Synthetically generated peptide
  VARIANT (1)..(16): Xaa = Any Amino Acid
CCEYACXNPXACTXGA

SEQ ID NO: 9996 - protein, 17 aa, Artificial Sequence
  Synthetically generated peptide
  VARIANT (1)..(17): Xaa = Any Amino Acid
CCEYACXNPXACTXXGA

SEQ ID NO: 9997 - protein, 17 aa, Artificial Sequence
  Synthetically generated peptide
  VARIANT (1)..(17): Xaa = Any Amino Acid
CCEYACXNPXACTXGXA

SEQ ID NO: 9998 - protein, 16 aa, Artificial Sequence
  Synthetically generated peptide
  VARIANT (1)..(16): Xaa = Any Amino Acid
CCEYACXNPXACTGXA

SEQ ID NO: 9999 - protein, 17 aa, Artificial Sequence
  Synthetically generated peptide
  VARIANT (1)..(17): Xaa = Any Amino Acid
CCEYACXNPXACTGXXA

SEQ ID NO: 10000 - protein, 15 aa, Artificial Sequence
  Synthetically generated peptide
  VARIANT (1)..(15): Xaa = Any Amino Acid
CCEYACXNPAXCTGA

SEQ ID NO: 10001 - protein, 16 aa, Artificial Sequence
  Synthetically generated peptide
  VARIANT (1)..(16): Xaa = Any Amino Acid
CCEYACXNPAXXCTGA

SEQ ID NO: 10002 - protein, 17 aa, Artificial Sequence
  Synthetically generated peptide
  VARIANT (1)..(17): Xaa = Any Amino Acid
CCEYACXNPAXXXCTGA

SEQ ID NO: 10003 - protein, 17 aa, Artificial Sequence
  Synthetically generated peptide
  VARIANT (1)..(17): Xaa = Any Amino Acid
CCEYACXNPAXXCXTGA

SEQ ID NO: 10004 - protein, 17 aa, Artificial Sequence
  Synthetically generated peptide
  VARIANT (1)..(17): Xaa = Any Amino Acid
CCEYACXNPAXXCTXGA

SEQ ID NO: 10005 - protein, 17 aa, Artificial Sequence
  Synthetically generated peptide
  VARIANT (1)..(17): Xaa = Any Amino Acid
CCEYACXNPAXXCTGXA

SEQ ID NO: 10006 - protein, 16 aa, Artificial Sequence
  Synthetically generated peptide
  VARIANT (1)..(16): Xaa = Any Amino Acid
CCEYACXNPAXCXTGA

SEQ ID NO: 10007 - protein, 17 aa, Artificial Sequence
  Synthetically generated peptide
  VARIANT (1)..(17): Xaa = Any Amino Acid
CCEYACXNPAXCXXTGA

SEQ ID NO: 10008 - protein, 17 aa, Artificial Sequence
  Synthetically generated peptide
  VARIANT (1)..(17): Xaa = Any Amino Acid
CCEYACXNPAXCXTXGA

SEQ ID NO: 10009 - protein, 17 aa, Artificial Sequence
  Synthetically generated peptide
  VARIANT (1)..(17): Xaa = Any Amino Acid
CCEYACXNPAXCXTGXA

SEQ ID NO: 10010 - protein, 16 aa, Artificial Sequence
  Synthetically generated peptide
  VARIANT (1)..(16): Xaa = Any Amino Acid
CCEYACXNPAXCTXGA

SEQ ID NO: 10011 - protein, 17 aa, Artificial Sequence
  Synthetically generated peptide
  VARIANT (1)..(17): Xaa = Any Amino Acid
CCEYACXNPAXCTXXGA

SEQ ID NO: 10012 - protein, 17 aa, Artificial Sequence
  Synthetically generated peptide
  VARIANT (1)..(17): Xaa = Any Amino Acid
CCEYACXNPAXCTXGXA

SEQ ID NO: 10013 - protein, 16 aa, Artificial Sequence
  Synthetically generated peptide
  VARIANT (1)..(16): Xaa = Any Amino Acid
CCEYACXNPAXCTGXA

SEQ ID NO: 10014 - protein, 17 aa, Artificial Sequence
  Synthetically generated peptide
  VARIANT (1)..(17): Xaa = Any Amino Acid
CCEYACXNPAXCTGXXA

SEQ ID NO: 10015 - protein, 15 aa, Artificial Sequence
  Synthetically generated peptide
  VARIANT (1)..(15): Xaa = Any Amino Acid
CCEYACXNPACXTGA

SEQ ID NO: 10016 - protein, 16 aa, Artificial Sequence
  Synthetically generated peptide
  VARIANT (1)..(16): Xaa = Any Amino Acid
CCEYACXNPACXXTGA

SEQ ID NO: 10017 - protein, 17 aa, Artificial Sequence
  Synthetically generated peptide
  VARIANT (1)..(17): Xaa = Any Amino Acid
CCEYACXNPACXXXTGA

SEQ ID NO: 10018 - protein, 17 aa, Artificial Sequence
  Synthetically generated peptide
  VARIANT (1)..(17): Xaa = Any Amino Acid
CCEYACXNPACXXTXGA

SEQ ID NO: 10019 - protein, 17 aa, Artificial Sequence
  Synthetically generated peptide
  VARIANT (1)..(17): Xaa = Any Amino Acid
CCEYACXNPACXXTGXA

SEQ ID NO: 10020 - protein, 16 aa, Artificial Sequence
  Synthetically generated peptide
  VARIANT (1)..(16): Xaa = Any Amino Acid
CCEYACXNPACXTXGA

SEQ ID NO: 10021 - protein, 17 aa, Artificial Sequence
  Synthetically generated peptide
  VARIANT (1)..(17): Xaa = Any Amino Acid
CCEYACXNPACXTXXGA

SEQ ID NO: 10022 - protein, 17 aa, Artificial Sequence
  Synthetically generated peptide
  VARIANT (1)..(17): Xaa = Any Amino Acid
CCEYACXNPACXTXGXA

SEQ ID NO: 10023 - protein, 16 aa, Artificial Sequence
  Synthetically generated peptide
  VARIANT (1)..(16): Xaa = Any Amino Acid
CCEYACXNPACXTGXA

SEQ ID NO: 10024 - protein, 17 aa, Artificial Sequence
  Synthetically generated peptide
  VARIANT (1)..(17): Xaa = Any Amino Acid
CCEYACXNPACXTGXXA

SEQ ID NO: 10025 - protein, 15 aa, Artificial Sequence
  Synthetically generated peptide
  VARIANT (1)..(15): Xaa = Any Amino Acid
CCEYACXNPACTXGA

SEQ ID NO: 10026 - protein, 16 aa, Artificial Sequence
  Synthetically generated peptide
  VARIANT (1)..(16): Xaa = Any Amino Acid
CCEYACXNPACTXXGA

SEQ ID NO: 10027 - protein, 17 aa, Artificial Sequence
  Synthetically generated peptide
  VARIANT (1)..(17): Xaa = Any Amino Acid
CCEYACXNPACTXXXGA

SEQ ID NO: 10028 - protein, 17 aa, Artificial Sequence
  Synthetically generated peptide
  VARIANT (1)..(17): Xaa = Any Amino Acid
CCEYACXNPACTXXGXA

SEQ ID NO: 10029 - protein, 16 aa, Artificial Sequence
  Synthetically generated peptide
  VARIANT (1)..(16): Xaa = Any Amino Acid
CCEYACXNPACTXGXA

SEQ ID NO: 10030 - protein, 17 aa, Artificial Sequence
  Synthetically generated peptide
  VARIANT (1)..(17): Xaa = Any Amino Acid
CCEYACXNPACTXGXXA

SEQ ID NO: 10031 - protein, 15 aa, Artificial Sequence
  Synthetically generated peptide
  VARIANT (1)..(15): Xaa = Any Amino Acid
CCEYACXNPACTGXA

SEQ ID NO: 10032 - protein, 16 aa, Artificial Sequence
  Synthetically generated peptide
  VARIANT (1)..(16): Xaa = Any Amino Acid
CCEYACXNPACTGXXA

SEQ ID NO: 10033 - protein, 17 aa, Artificial Sequence
  Synthetically generated peptide
  VARIANT (1)..(17): Xaa = Any Amino Acid
CCEYACXNPACTGXXXA

SEQ ID NO: 10034 - protein, 14 aa, Artificial Sequence
  Synthetically generated peptide
  VARIANT (1)..(14): Xaa = Any Amino Acid
CCEYACNXPACTGA

SEQ ID NO: 10035 - protein, 15 aa, Artificial Sequence
  Synthetically generated peptide
  VARIANT (1)..(15): Xaa = Any Amino Acid
CCEYACNXXPACTGA

SEQ ID NO: 10036 - protein, 16 aa, Artificial Sequence
  Synthetically generated peptide
  VARIANT (1)..(16): Xaa = Any Amino Acid
CCEYACNXXXPACTGA

SEQ ID NO: 10037 - protein, 17 aa, Artificial Sequence
  Synthetically generated peptide
  VARIANT (1)..(17): Xaa = Any Amino Acid
CCEYACNXXXXPACTGA

SEQ ID NO: 10038 - protein, 17 aa, Artificial Sequence
  Synthetically generated peptide
  VARIANT (1)..(17): Xaa = Any Amino Acid
CCEYACNXXXPXACTGA

SEQ ID NO: 10039 - protein, 17 aa, Artificial Sequence
  Synthetically generated peptide
  VARIANT (1)..(17): Xaa = Any Amino Acid
CCEYACNXXXPAXCTGA

SEQ ID NO: 10040 - protein, 17 aa, Artificial Sequence
  Synthetically generated peptide
  VARIANT (1)..(17): Xaa = Any Amino Acid
CCEYACNXXXPACXTGA

SEQ ID NO: 10041 - protein, 17 aa, Artificial Sequence
  Synthetically generated peptide
  VARIANT (1)..(17): Xaa = Any Amino Acid
CCEYACNXXXPACTXGA

SEQ ID NO: 10042 - protein, 17 aa, Artificial Sequence
  Synthetically generated peptide
  VARIANT (1)..(17): Xaa = Any Amino Acid
CCEYACNXXXPACTGXA

SEQ ID NO: 10043 - protein, 16 aa, Artificial Sequence
  Synthetically generated peptide
  VARIANT (1)..(16): Xaa = Any Amino Acid
CCEYACNXXPXACTGA

SEQ ID NO: 10044 - protein, 17 aa, Artificial Sequence
  Synthetically generated peptide
  VARIANT (1)..(17): Xaa = Any Amino Acid
CCEYACNXXPXXACTGA

SEQ ID NO: 10045 - protein, 17 aa, Artificial Sequence
  Synthetically generated peptide
  VARIANT (1)..(17): Xaa = Any Amino Acid
CCEYACNXXPXAXCTGA

SEQ ID NO: 10046 - protein, 17 aa, Artificial Sequence
  Synthetically generated peptide
  VARIANT (1)..(17): Xaa = Any Amino Acid
CCEYACNXXPXACXTGA

SEQ ID NO: 10047 - protein, 17 aa, Artificial Sequence
  Synthetically generated peptide
  VARIANT (1)..(17): Xaa = Any Amino Acid
CCEYACNXXPXACTXGA

SEQ ID NO: 10048 - protein, 17 aa, Artificial Sequence
  Synthetically generated peptide
  VARIANT (1)..(17): Xaa = Any Amino Acid
CCEYACNXXPXACTGXA

SEQ ID NO: 10049 - protein, 16 aa, Artificial Sequence
  Synthetically generated peptide
  VARIANT (1)..(16): Xaa = Any Amino Acid
CCEYACNXXPAXCTGA

SEQ ID NO: 10050 - protein, 17 aa, Artificial Sequence
  Synthetically generated peptide
  VARIANT (1)..(17): Xaa = Any Amino Acid
CCEYACNXXPAXXCTGA

SEQ ID NO: 10051 - protein, 17 aa, Artificial Sequence
  Synthetically generated peptide
  VARIANT (1)..(17): Xaa = Any Amino Acid
CCEYACNXXPAXCXTGA

SEQ ID NO: 10052 - protein, 17 aa, Artificial Sequence
  Synthetically generated peptide
  VARIANT (1)..(17): Xaa = Any Amino Acid
CCEYACNXXPAXCTXGA

SEQ ID NO: 10053 - protein, 17 aa, Artificial Sequence
  Synthetically generated peptide
  VARIANT (1)..(17): Xaa = Any Amino Acid
CCEYACNXXPAXCTGXA

SEQ ID NO: 10054 - protein, 16 aa, Artificial Sequence
  Synthetically generated peptide
  VARIANT (1)..(16): Xaa = Any Amino Acid
CCEYACNXXPACXTGA

SEQ ID NO: 10055 - protein, 17 aa, Artificial Sequence
  Synthetically generated peptide
  VARIANT (1)..(17): Xaa = Any Amino Acid
CCEYACNXXPACXXTGA

SEQ ID NO: 10056 - protein, 17 aa, Artificial Sequence
  Synthetically generated peptide
  VARIANT (1)..(17): Xaa = Any Amino Acid
CCEYACNXXPACXTXGA

SEQ ID NO: 10057 - protein, 17 aa, Artificial Sequence
  Synthetically generated peptide
  VARIANT (1)..(17): Xaa = Any Amino Acid
CCEYACNXXPACXTGXA

SEQ ID NO: 10058 - protein, 16 aa, Artificial Sequence
  Synthetically generated peptide
  VARIANT (1)..(16): Xaa = Any Amino Acid
CCEYACNXXPACTXGA

SEQ ID NO: 10059 - protein, 17 aa, Artificial Sequence
  Synthetically generated peptide
  VARIANT (1)..(17): Xaa = Any Amino Acid
CCEYACNXXPACTXXGA

SEQ ID NO: 10060 - protein, 17 aa, Artificial Sequence
  Synthetically generated peptide
  VARIANT (1)..(17): Xaa = Any Amino Acid
CCEYACNXXPACTXGXA

SEQ ID NO: 10061 - protein, 16 aa, Artificial Sequence
  Synthetically generated peptide
  VARIANT (1)..(16): Xaa = Any Amino Acid
CCEYACNXXPACTGXA

SEQ ID NO: 10062 - protein, 17 aa, Artificial Sequence
  Synthetically generated peptide
  VARIANT (1)..(17): Xaa = Any Amino Acid
CCEYACNXXPACTGXXA

SEQ ID NO: 10063 - protein, 15 aa, Artificial Sequence
  Synthetically generated peptide
  VARIANT (1)..(15): Xaa = Any Amino Acid
CCEYACNXPXACTGA

SEQ ID NO: 10064 - protein, 16 aa, Artificial Sequence
  Synthetically generated peptide
  VARIANT (1)..(16): Xaa = Any Amino Acid
CCEYACNXPXXACTGA

SEQ ID NO: 10065 - protein, 17 aa, Artificial Sequence
  Synthetically generated peptide
  VARIANT (1)..(17): Xaa = Any Amino Acid
CCEYACNXPXXXACTGA

SEQ ID NO: 10066 - protein, 17 aa, Artificial Sequence
  Synthetically generated peptide
  VARIANT (1)..(17): Xaa = Any Amino Acid
CCEYACNXPXXAXCTGA

SEQ ID NO: 10067 - protein, 17 aa, Artificial Sequence
  Synthetically generated peptide
  VARIANT (1)..(17): Xaa = Any Amino Acid
CCEYACNXPXXACXTGA

SEQ ID NO: 10068 - protein, 17 aa, Artificial Sequence
  Synthetically generated peptide
  VARIANT (1)..(17): Xaa = Any Amino Acid
CCEYACNXPXXACTXGA

SEQ ID NO: 10069 - protein, 17 aa, Artificial Sequence
  Synthetically generated peptide
  VARIANT (1)..(17): Xaa = Any Amino Acid
CCEYACNXPXXACTGXA

SEQ ID NO: 10070 - protein, 16 aa, Artificial Sequence
  Synthetically generated peptide
  VARIANT (1)..(16): Xaa = Any Amino Acid
CCEYACNXPXAXCTGA

SEQ ID NO: 10071 - protein, 17 aa, Artificial Sequence
  Synthetically generated peptide
  VARIANT (1)..(17): Xaa = Any Amino Acid
CCEYACNXPXAXXCTGA

SEQ ID NO: 10072 - protein, 17 aa, Artificial Sequence
  Synthetically generated peptide
  VARIANT (1)..(17): Xaa = Any Amino Acid
CCEYACNXPXAXCXTGA

SEQ ID NO: 10073 - protein, 17 aa, Artificial Sequence
  Synthetically generated peptide
  VARIANT (1)..(17): Xaa = Any Amino Acid
CCEYACNXPXAXCTXGA

SEQ ID NO: 10074 - protein, 17 aa, Artificial Sequence
  Synthetically generated peptide
  VARIANT (1)..(17): Xaa = Any Amino Acid
CCEYACNXPXAXCTGXA

SEQ ID NO: 10075 - protein, 16 aa, Artificial Sequence
  Synthetically generated peptide
  VARIANT (1)..(16): Xaa = Any Amino Acid
CCEYACNXPXACXTGA

SEQ ID NO: 10076 - protein, 17 aa, Artificial Sequence
  Synthetically generated peptide
  VARIANT (1)..(17): Xaa = Any Amino Acid
CCEYACNXPXACXXTGA

SEQ ID NO: 10077 - protein, 17 aa, Artificial Sequence
  Synthetically generated peptide
  VARIANT (1)..(17): Xaa = Any Amino Acid
CCEYACNXPXACXTXGA

SEQ ID NO: 10078 - protein, 17 aa, Artificial Sequence
  Synthetically generated peptide
  VARIANT (1)..(17): Xaa = Any Amino Acid
CCEYACNXPXACXTGXA

SEQ ID NO: 10079 - protein, 16 aa, Artificial Sequence
  Synthetically generated peptide
  VARIANT (1)..(16): Xaa = Any Amino Acid
CCEYACNXPXACTXGA

SEQ ID NO: 10080 - protein, 17 aa, Artificial Sequence
  Synthetically generated peptide
  VARIANT (1)..(17): Xaa = Any Amino Acid
CCEYACNXPXACTXXGA

SEQ ID NO: 10081 - protein, 17 aa, Artificial Sequence
  Synthetically generated peptide
  VARIANT (1)..(17): Xaa = Any Amino Acid
CCEYACNXPXACTXGXA

SEQ ID NO: 10082 - protein, 16 aa, Artificial Sequence
  Synthetically generated peptide
  VARIANT (1)..(16): Xaa = Any Amino Acid
CCEYACNXPXACTGXA

SEQ ID NO: 10083 - protein, 17 aa, Artificial Sequence
  Synthetically generated peptide
  VARIANT (1)..(17): Xaa = Any Amino Acid
CCEYACNXPXACTGXXA

SEQ ID NO: 10084 - protein, 15 aa, Artificial Sequence
  Synthetically generated peptide
  VARIANT (1)..(15): Xaa = Any Amino Acid
CCEYACNXPAXCTGA

SEQ ID NO: 10085 - protein, 16 aa, Artificial Sequence
  Synthetically generated peptide
  VARIANT (1)..(16): Xaa = Any Amino Acid
CCEYACNXPAXXCTGA

SEQ ID NO: 10086 - protein, 17 aa, Artificial Sequence
  Synthetically generated peptide
  VARIANT (1)..(17): Xaa = Any Amino Acid
CCEYACNXPAXXXCTGA

SEQ ID NO: 10087 - protein, 17 aa, Artificial Sequence
  Synthetically generated peptide
  VARIANT (1)..(17): Xaa = Any Amino Acid
CCEYACNXPAXXCXTGA

SEQ ID NO: 10088 - protein, 17 aa, Artificial Sequence
  Synthetically generated peptide
  VARIANT (1)..(17): Xaa = Any Amino Acid
CCEYACNXPAXXCTXGA

SEQ ID NO: 10089 - protein, 17 aa, Artificial Sequence
  Synthetically generated peptide
  VARIANT (1)..(17): Xaa = Any Amino Acid
CCEYACNXPAXXCTGXA

SEQ ID NO: 10090 - protein, 16 aa, Artificial Sequence
  Synthetically generated peptide
  VARIANT (1)..(16): Xaa = Any Amino Acid
CCEYACNXPAXCXTGA

SEQ ID NO: 10091 - protein, 17 aa, Artificial Sequence
  Synthetically generated peptide
  VARIANT (1)..(17): Xaa = Any Amino Acid
CCEYACNXPAXCXXTGA

SEQ ID NO: 10092 - protein, 17 aa, Artificial Sequence
  Synthetically generated peptide
  VARIANT (1)..(17): Xaa = Any Amino Acid
CCEYACNXPAXCXTXGA

SEQ ID NO: 10093 - protein, 17 aa, Artificial Sequence
  Synthetically generated peptide
  VARIANT (1)..(17): Xaa = Any Amino Acid
CCEYACNXPAXCXTGXA

SEQ ID NO: 10094 - protein, 16 aa, Artificial Sequence
  Synthetically generated peptide
  VARIANT (1)..(16): Xaa = Any Amino Acid
CCEYACNXPAXCTXGA

SEQ ID NO: 10095 - protein, 17 aa, Artificial Sequence
  Synthetically generated peptide
  VARIANT (1)..(17): Xaa = Any Amino Acid
CCEYACNXPAXCTXXGA

SEQ ID NO: 10096 - protein, 17 aa, Artificial Sequence
  Synthetically generated peptide
  VARIANT (1)..(17): Xaa = Any Amino Acid
CCEYACNXPAXCTXGXA

SEQ ID NO: 10097 - protein, 16 aa, Artificial Sequence
  Synthetically generated peptide
  VARIANT (1)..(16): Xaa = Any Amino Acid
CCEYACNXPAXCTGXA

SEQ ID NO: 10098 - protein, 17 aa, Artificial Sequence
  Synthetically generated peptide
  VARIANT (1)..(17): Xaa = Any Amino Acid
CCEYACNXPAXCTGXXA

SEQ ID NO: 10099 - protein, 15 aa, Artificial Sequence
  Synthetically generated peptide
  VARIANT (1)..(15): Xaa = Any Amino Acid
CCEYACNXPACXTGA

SEQ ID NO: 10100 - protein, 16 aa, Artificial Sequence
  Synthetically generated peptide
  VARIANT (1)..(16): Xaa = Any Amino Acid
CCEYACNXPACXXTGA

SEQ ID NO: 10101 - protein, 17 aa, Artificial Sequence
  Synthetically generated peptide
  VARIANT (1)..(17): Xaa = Any Amino Acid
CCEYACNXPACXXXTGA

SEQ ID NO: 10102 - protein, 17 aa, Artificial Sequence
  Synthetically generated peptide
  VARIANT (1)..(17): Xaa = Any Amino Acid
CCEYACNXPACXXTXGA

SEQ ID NO: 10103 - protein, 17 aa, Artificial Sequence
  Synthetically generated peptide
  VARIANT (1)..(17): Xaa = Any Amino Acid
CCEYACNXPACXXTGXA

SEQ ID NO: 10104 - protein, 16 aa, Artificial Sequence
  Synthetically generated peptide
  VARIANT (1)..(16): Xaa = Any Amino Acid
CCEYACNXPACXTXGA

SEQ ID NO: 10105 - protein, 17 aa, Artificial Sequence
  Synthetically generated peptide
  VARIANT (1)..(17): Xaa = Any Amino Acid
CCEYACNXPACXTXXGA

SEQ ID NO: 10106 - protein, 17 aa, Artificial Sequence
  Synthetically generated peptide
  VARIANT (1)..(17): Xaa = Any Amino Acid
CCEYACNXPACXTXGXA

SEQ ID NO: 10107 - protein, 16 aa, Artificial Sequence
  Synthetically generated peptide
  VARIANT (1)..(16): Xaa = Any Amino Acid
CCEYACNXPACXTGXA

SEQ ID NO: 10108 - protein, 17 aa, Artificial Sequence
  Synthetically generated peptide
  VARIANT (1)..(17): Xaa = Any Amino Acid
CCEYACNXPACXTGXXA

SEQ ID NO: 10109 - protein, 15 aa, Artificial Sequence
  Synthetically generated peptide
  VARIANT (1)..(15): Xaa = Any Amino Acid
CCEYACNXPACTXGA

SEQ ID NO: 10110 - protein, 16 aa, Artificial Sequence
  Synthetically generated peptide
  VARIANT (1)..(16): Xaa = Any Amino Acid
CCEYACNXPACTXXGA

SEQ ID NO: 10111 - protein, 17 aa, Artificial Sequence
  Synthetically generated peptide
  VARIANT (1)..(17): Xaa = Any Amino Acid
CCEYACNXPACTXXXGA

SEQ ID NO: 10112 - protein, 17 aa, Artificial Sequence
  Synthetically generated peptide
  VARIANT (1)..(17): Xaa = Any Amino Acid
CCEYACNXPACTXXGXA

SEQ ID NO: 10113 - protein, 16 aa, Artificial Sequence
  Synthetically generated peptide
  VARIANT (1)..(16): Xaa = Any Amino Acid
CCEYACNXPACTXGXA

SEQ ID NO: 10114 - protein, 17 aa, Artificial Sequence
  Synthetically generated peptide
  VARIANT (1)..(17): Xaa = Any Amino Acid
CCEYACNXPACTXGXXA

SEQ ID NO: 10115 - protein, 15 aa, Artificial Sequence
  Synthetically generated peptide
  VARIANT (1)..(15): Xaa = Any Amino Acid
CCEYACNXPACTGXA

SEQ ID NO: 10116 - protein, 16 aa, Artificial Sequence
  Synthetically generated peptide
  VARIANT (1)..(16): Xaa = Any Amino Acid
CCEYACNXPACTGXXA

SEQ ID NO: 10117 - protein, 17 aa, Artificial Sequence
  Synthetically generated peptide
  VARIANT (1)..(17): Xaa = Any Amino Acid
CCEYACNXPACTGXXXA

SEQ ID NO: 10118 - protein, 14 aa, Artificial Sequence
  Synthetically generated peptide
  VARIANT (1)..(14): Xaa = Any Amino Acid
CCEYACNPXACTGA

SEQ ID NO: 10119 - protein, 15 aa, Artificial Sequence
  Synthetically generated peptide
  VARIANT (1)..(15): Xaa = Any Amino Acid
CCEYACNPXXACTGA

SEQ ID NO: 10120 - protein, 16 aa, Artificial Sequence
  Synthetically generated peptide
  VARIANT (1)..(16): Xaa = Any Amino Acid
CCEYACNPXXXACTGA

SEQ ID NO: 10121 - protein, 17 aa, Artificial Sequence
  Synthetically generated peptide
  VARIANT (1)..(17): Xaa = Any Amino Acid
CCEYACNPXXXXACTGA

SEQ ID NO: 10122 - protein, 17 aa, Artificial Sequence
  Synthetically generated peptide
  VARIANT (1)..(17): Xaa = Any Amino Acid
CCEYACNPXXXAXCTGA

SEQ ID NO: 10123 - protein, 17 aa, Artificial Sequence
  Synthetically generated peptide
  VARIANT (1)..(17): Xaa = Any Amino Acid
CCEYACNPXXXACXTGA

SEQ ID NO: 10124 - protein, 17 aa, Artificial Sequence
  Synthetically generated peptide
  VARIANT (1)..(17): Xaa = Any Amino Acid
CCEYACNPXXXACTXGA

SEQ ID NO: 10125 - protein, 17 aa, Artificial Sequence
  Synthetically generated peptide
  VARIANT (1)..(17): Xaa = Any Amino Acid
CCEYACNPXXXACTGXA

SEQ ID NO: 10126 - protein, 16 aa, Artificial Sequence
  Synthetically generated peptide
  VARIANT (1)..(16): Xaa = Any Amino Acid
CCEYACNPXXAXCTGA

SEQ ID NO: 10127 - protein, 17 aa, Artificial Sequence
  Synthetically generated peptide
  VARIANT (1)..(17): Xaa = Any Amino Acid
CCEYACNPXXAXXCTGA

SEQ ID NO: 10128 - protein, 17 aa, Artificial Sequence
  Synthetically generated peptide
  VARIANT (1)..(17): Xaa = Any Amino Acid
CCEYACNPXXAXCXTGA

SEQ ID NO: 10129 - protein, 17 aa, Artificial Sequence
  Synthetically generated peptide
  VARIANT (1)..(17): Xaa = Any Amino Acid
CCEYACNPXXAXCTXGA

SEQ ID NO: 10130 - protein, 17 aa, Artificial Sequence
  Synthetically generated peptide
  VARIANT (1)..(17): Xaa = Any Amino Acid
CCEYACNPXXAXCTGXA

SEQ ID NO: 10131 - protein, 16 aa, Artificial Sequence
  Synthetically generated peptide
  VARIANT (1)..(16): Xaa = Any Amino Acid
CCEYACNPXXACXTGA

SEQ ID NO: 10132 - protein, 17 aa, Artificial Sequence
  Synthetically generated peptide
  VARIANT (1)..(17): Xaa = Any Amino Acid
CCEYACNPXXACXXTGA

SEQ ID NO: 10133 - protein, 17 aa, Artificial Sequence
  Synthetically generated peptide
  VARIANT (1)..(17): Xaa = Any Amino Acid
CCEYACNPXXACXTXGA

SEQ ID NO: 10134 - protein, 17 aa, Artificial Sequence
  Synthetically generated peptide
  VARIANT (1)..(17): Xaa = Any Amino Acid
CCEYACNPXXACXTGXA

SEQ ID NO: 10135 - protein, 16 aa, Artificial Sequence
  Synthetically generated peptide
  VARIANT (1)..(16): Xaa = Any Amino Acid
CCEYACNPXXACTXGA

SEQ ID NO: 10136 - protein, 17 aa, Artificial Sequence
  Synthetically generated peptide
  VARIANT (1)..(17): Xaa = Any Amino Acid
CCEYACNPXXACTXXGA

SEQ ID NO: 10137 - protein, 17 aa, Artificial Sequence
  Synthetically generated peptide
  VARIANT (1)..(17): Xaa = Any Amino Acid
CCEYACNPXXACTXGXA

SEQ ID NO: 10138 - protein, 16 aa, Artificial Sequence
  Synthetically generated peptide
  VARIANT (1)..(16): Xaa = Any Amino Acid
CCEYACNPXXACTGXA

SEQ ID NO: 10139 - protein, 17 aa, Artificial Sequence
  Synthetically generated peptide
  VARIANT (1)..(17): Xaa = Any Amino Acid
CCEYACNPXXACTGXXA

SEQ ID NO: 10140 - protein, 15 aa, Artificial Sequence
  Synthetically generated peptide
  VARIANT (1)..(15): Xaa = Any Amino Acid
CCEYACNPXAXCTGA

SEQ ID NO: 10141 - protein, 16 aa, Artificial Sequence
  Synthetically generated peptide
  VARIANT (1)..(16): Xaa = Any Amino Acid
CCEYACNPXAXXCTGA

SEQ ID NO: 10142 - protein, 17 aa, Artificial Sequence
  Synthetically generated peptide
  VARIANT (1)..(17): Xaa = Any Amino Acid
CCEYACNPXAXXXCTGA

SEQ ID NO: 10143 - protein, 17 aa, Artificial Sequence
  Synthetically generated peptide
  VARIANT (1)..(17): Xaa = Any Amino Acid
CCEYACNPXAXXCXTGA

SEQ ID NO: 10144 - protein, 17 aa, Artificial Sequence
  Synthetically generated peptide
  VARIANT (1)..(17): Xaa = Any Amino Acid
CCEYACNPXAXXCTXGA

SEQ ID NO: 10145 - protein, 17 aa, Artificial Sequence
  Synthetically generated peptide
  VARIANT (1)..(17): Xaa = Any Amino Acid
CCEYACNPXAXXCTGXA

SEQ ID NO: 10146 - protein, 16 aa, Artificial Sequence
  Synthetically generated peptide
  VARIANT (1)..(16): Xaa = Any Amino Acid
CCEYACNPXAXCXTGA

SEQ ID NO: 10147 - protein, 17 aa, Artificial Sequence
  Synthetically generated peptide
  VARIANT (1)..(17): Xaa = Any Amino Acid
CCEYACNPXAXCXXTGA

SEQ ID NO: 10148 - protein, 17 aa, Artificial Sequence
  Synthetically generated peptide
  VARIANT (1)..(17): Xaa = Any Amino Acid
CCEYACNPXAXCXTXGA

SEQ ID NO: 10149 - protein, 17 aa, Artificial Sequence
  Synthetically generated peptide
  VARIANT (1)..(17): Xaa = Any Amino Acid
CCEYACNPXAXCXTGXA

SEQ ID NO: 10150 - protein, 16 aa, Artificial Sequence
  Synthetically generated peptide
  VARIANT (1)..(16): Xaa = Any Amino Acid
CCEYACNPXAXCTXGA

SEQ ID NO: 10151 - protein, 17 aa, Artificial Sequence
  Synthetically generated peptide
  VARIANT (1)..(17): Xaa = Any Amino Acid
CCEYACNPXAXCTXXGA

SEQ ID NO: 10152 - protein, 17 aa, Artificial Sequence
  Synthetically generated peptide
  VARIANT (1)..(17): Xaa = Any Amino Acid
CCEYACNPXAXCTXGXA

SEQ ID NO: 10153 - protein, 16 aa, Artificial Sequence
  Synthetically generated peptide
  VARIANT (1)..(16): Xaa = Any Amino Acid
CCEYACNPXAXCTGXA

SEQ ID NO: 10154 - protein, 17 aa, Artificial Sequence
  Synthetically generated peptide
  VARIANT (1)..(17): Xaa = Any Amino Acid
CCEYACNPXAXCTGXXA

SEQ ID NO: 10155 - protein, 15 aa, Artificial Sequence
  Synthetically generated peptide
  VARIANT (1)..(15): Xaa = Any Amino Acid
CCEYACNPXACXTGA

SEQ ID NO: 10156 - protein, 16 aa, Artificial Sequence
  Synthetically generated peptide
  VARIANT (1)..(16): Xaa = Any Amino Acid
CCEYACNPXACXXTGA

SEQ ID NO: 10157 - protein, 17 aa, Artificial Sequence
  Synthetically generated peptide
  VARIANT (1)..(17): Xaa = Any Amino Acid
CCEYACNPXACXXXTGA

SEQ ID NO: 10158 - protein, 17 aa, Artificial Sequence
  Synthetically generated peptide
  VARIANT (1)..(17): Xaa = Any Amino Acid
CCEYACNPXACXXTXGA

SEQ ID NO: 10159 - protein, 17 aa, Artificial Sequence
  Synthetically generated peptide
  VARIANT (1)..(17): Xaa = Any Amino Acid
CCEYACNPXACXXTGXA

SEQ ID NO: 10160 - protein, 16 aa, Artificial Sequence
  Synthetically generated peptide
  VARIANT (1)..(16): Xaa = Any Amino Acid
CCEYACNPXACXTXGA

SEQ ID NO: 10161 - protein, 17 aa, Artificial Sequence
  Synthetically generated peptide
  VARIANT (1)..(17): Xaa = Any Amino Acid
CCEYACNPXACXTXXGA

SEQ ID NO: 10162 - protein, 17 aa, Artificial Sequence
  Synthetically generated peptide
  VARIANT (1)..(17): Xaa = Any Amino Acid
CCEYACNPXACXTXGXA

SEQ ID NO: 10163 - protein, 16 aa, Artificial Sequence
  Synthetically generated peptide
  VARIANT (1)..(16): Xaa = Any Amino Acid
CCEYACNPXACXTGXA

SEQ ID NO: 10164 - protein, 17 aa, Artificial Sequence
  Synthetically generated peptide
  VARIANT (1)..(17): Xaa = Any Amino Acid
CCEYACNPXACXTGXXA

SEQ ID NO: 10165 - protein, 15 aa, Artificial Sequence
  Synthetically generated peptide
  VARIANT (1)..(15): Xaa = Any Amino Acid
CCEYACNPXACTXGA

SEQ ID NO: 10166 - protein, 16 aa, Artificial Sequence
  Synthetically generated peptide
  VARIANT (1)..(16): Xaa = Any Amino Acid
CCEYACNPXACTXXGA

SEQ ID NO: 10167 - protein, 17 aa, Artificial Sequence
  Synthetically generated peptide
  VARIANT (1)..(17): Xaa = Any Amino Acid
CCEYACNPXACTXXXGA

SEQ ID NO: 10168 - protein, 17 aa, Artificial Sequence
  Synthetically generated peptide
  VARIANT (1)..(17): Xaa = Any Amino Acid
CCEYACNPXACTXXGXA

SEQ ID NO: 10169 - protein, 16 aa, Artificial Sequence
  Synthetically generated peptide
  VARIANT (1)..(16): Xaa = Any Amino Acid
CCEYACNPXACTXGXA

SEQ ID NO: 10170 - protein, 17 aa, Artificial Sequence
  Synthetically generated peptide
  VARIANT (1)..(17): Xaa = Any Amino Acid
CCEYACNPXACTXGXXA

SEQ ID NO: 10171 - protein, 15 aa, Artificial Sequence
  Synthetically generated peptide
  VARIANT (1)..(15): Xaa = Any Amino Acid
CCEYACNPXACTGXA

SEQ ID NO: 10172 - protein, 16 aa, Artificial Sequence
  Synthetically generated peptide
  VARIANT (1)..(16): Xaa = Any Amino Acid
CCEYACNPXACTGXXA

SEQ ID NO: 10173 - protein, 17 aa, Artificial Sequence
  Synthetically generated peptide
  VARIANT (1)..(17): Xaa = Any Amino Acid
CCEYACNPXACTGXXXA

SEQ ID NO: 10174 - protein, 14 aa, Artificial Sequence
  Synthetically generated peptide
  VARIANT (1)..(14): Xaa = Any Amino Acid
CCEYACNPAXCTGA

SEQ ID NO: 10175 - protein, 15 aa, Artificial Sequence
  Synthetically generated peptide
  VARIANT (1)..(15): Xaa = Any Amino Acid
CCEYACNPAXXCTGA

SEQ ID NO: 10176 - protein, 16 aa, Artificial Sequence
  Synthetically generated peptide
  VARIANT (1)..(16): Xaa = Any Amino Acid
CCEYACNPAXXXCTGA

SEQ ID NO: 10177 - protein, 17 aa, Artificial Sequence
  Synthetically generated peptide
  VARIANT (1)..(17): Xaa = Any Amino Acid
CCEYACNPAXXXXCTGA

SEQ ID NO: 10178 - protein, 17 aa, Artificial Sequence
  Synthetically generated peptide
  VARIANT (1)..(17): Xaa = Any Amino Acid
CCEYACNPAXXXCXTGA

SEQ ID NO: 10179 - protein, 17 aa, Artificial Sequence
  Synthetically generated peptide
  VARIANT (1)..(17): Xaa = Any Amino Acid
CCEYACNPAXXXCTXGA

SEQ ID NO: 10180 - protein, 17 aa, Artificial Sequence
  Synthetically generated peptide
  VARIANT (1)..(17): Xaa = Any Amino Acid
CCEYACNPAXXXCTGXA

SEQ ID NO: 10181 - protein, 16 aa, Artificial Sequence
  Synthetically generated peptide
  VARIANT (1)..(16): Xaa = Any Amino Acid
CCEYACNPAXXCXTGA

SEQ ID NO: 10182 - protein, 17 aa, Artificial Sequence
  Synthetically generated peptide
  VARIANT (1)..(17): Xaa = Any Amino Acid
CCEYACNPAXXCXXTGA

SEQ ID NO: 10183 - protein, 17 aa, Artificial Sequence
  Synthetically generated peptide
  VARIANT (1)..(17): Xaa = Any Amino Acid
CCEYACNPAXXCXTXGA

SEQ ID NO: 10184 - protein, 17 aa, Artificial Sequence
  Synthetically generated peptide
  VARIANT (1)..(17): Xaa = Any Amino Acid
CCEYACNPAXXCXTGXA

SEQ ID NO: 10185 - protein, 16 aa, Artificial Sequence
  Synthetically generated peptide
  VARIANT (1)..(16): Xaa = Any Amino Acid
CCEYACNPAXXCTXGA

SEQ ID NO: 10186 - protein, 17 aa, Artificial Sequence
  Synthetically generated peptide
  VARIANT (1)..(17): Xaa = Any Amino Acid
CCEYACNPAXXCTXXGA

SEQ ID NO: 10187 - protein, 17 aa, Artificial Sequence
  Synthetically generated peptide
  VARIANT (1)..(17): Xaa = Any Amino Acid
CCEYACNPAXXCTXGXA

SEQ ID NO: 10188 - protein, 16 aa, Artificial Sequence
  Synthetically generated peptide
  VARIANT (1)..(16): Xaa = Any Amino Acid
CCEYACNPAXXCTGXA

SEQ ID NO: 10189 - protein, 17 aa, Artificial Sequence
  Synthetically generated peptide
  VARIANT (1)..(17): Xaa = Any Amino Acid
CCEYACNPAXXCTGXXA

SEQ ID NO: 10190 - protein, 15 aa, Artificial Sequence
  Synthetically generated peptide
  VARIANT (1)..(15): Xaa = Any Amino Acid
CCEYACNPAXCXTGA

SEQ ID NO: 10191 - protein, 16 aa, Artificial Sequence
  Synthetically generated peptide
  VARIANT (1)..(16): Xaa = Any Amino Acid
CCEYACNPAXCXXTGA

SEQ ID NO: 10192 - protein, 17 aa, Artificial Sequence
  Synthetically generated peptide
  VARIANT (1)..(17): Xaa = Any Amino Acid
CCEYACNPAXCXXXTGA

SEQ ID NO: 10193 - protein, 17 aa, Artificial Sequence
  Synthetically generated peptide
  VARIANT (1)..(17): Xaa = Any Amino Acid
CCEYACNPAXCXXTXGA

SEQ ID NO: 10194 - protein, 17 aa, Artificial Sequence
  Synthetically generated peptide
  VARIANT (1)..(17): Xaa = Any Amino Acid
CCEYACNPAXCXXTGXA

SEQ ID NO: 10195 - protein, 16 aa, Artificial Sequence
  Synthetically generated peptide
  VARIANT (1)..(16): Xaa = Any Amino Acid
CCEYACNPAXCXTXGA

SEQ ID NO: 10196 - protein, 17 aa, Artificial Sequence
  Synthetically generated peptide
  VARIANT (1)..(17): Xaa = Any Amino Acid
CCEYACNPAXCXTXXGA

SEQ ID NO: 10197 - protein, 17 aa, Artificial Sequence
  Synthetically generated peptide
  VARIANT (1)..(17): Xaa = Any Amino Acid
CCEYACNPAXCXTXGXA

SEQ ID NO: 10198 - protein, 16 aa, Artificial Sequence
  Synthetically generated peptide
  VARIANT (1)..(16): Xaa = Any Amino Acid
CCEYACNPAXCXTGXA

SEQ ID NO: 10199 - protein, 17 aa, Artificial Sequence
  Synthetically generated peptide
  VARIANT (1)..(17): Xaa = Any Amino Acid
CCEYACNPAXCXTGXXA

SEQ ID NO: 10200 - protein, 15 aa, Artificial Sequence
  Synthetically generated peptide
  VARIANT (1)..(15): Xaa = Any Amino Acid
CCEYACNPAXCTXGA

SEQ ID NO: 10201 - protein, 16 aa, Artificial Sequence
  Synthetically generated peptide
  VARIANT (1)..(16): Xaa = Any Amino Acid
CCEYACNPAXCTXXGA

SEQ ID NO: 10202 - protein, 17 aa, Artificial Sequence
  Synthetically generated peptide
  VARIANT (1)..(17): Xaa = Any Amino Acid
CCEYACNPAXCTXXXGA

SEQ ID NO: 10203 - protein, 17 aa, Artificial Sequence
  Synthetically generated peptide
  VARIANT (1)..(17): Xaa = Any Amino Acid
CCEYACNPAXCTXXGXA

SEQ ID NO: 10204 - protein, 16 aa, Artificial Sequence
  Synthetically generated peptide
  VARIANT (1)..(16): Xaa = Any Amino Acid
CCEYACNPAXCTXGXA

SEQ ID NO: 10205 - protein, 17 aa, Artificial Sequence
  Synthetically generated peptide
  VARIANT (1)..(17): Xaa = Any Amino Acid
CCEYACNPAXCTXGXXA

SEQ ID NO: 10206 - protein, 15 aa, Artificial Sequence
  Synthetically generated peptide
  VARIANT (1)..(15): Xaa = Any Amino Acid
CCEYACNPAXCTGXA

SEQ ID NO: 10207 - protein, 16 aa, Artificial Sequence
  Synthetically generated peptide
  VARIANT (1)..(16): Xaa = Any Amino Acid
CCEYACNPAXCTGXXA

SEQ ID NO: 10208 - protein, 17 aa, Artificial Sequence
  Synthetically generated peptide
  VARIANT (1)..(17): Xaa = Any Amino Acid
CCEYACNPAXCTGXXXA

SEQ ID NO: 10209 - protein, 14 aa, Artificial Sequence
  Synthetically generated peptide
  VARIANT (1)..(14): Xaa = Any Amino Acid
CCEYACNPACXTGA

SEQ ID NO: 10210 - protein, 15 aa, Artificial Sequence
  Synthetically generated peptide
  VARIANT (1)..(15): Xaa = Any Amino Acid
CCEYACNPACXXTGA

SEQ ID NO: 10211 - protein, 16 aa, Artificial Sequence
  Synthetically generated peptide
  VARIANT (1)..(16): Xaa = Any Amino Acid
CCEYACNPACXXXTGA

SEQ ID NO: 10212 - protein, 17 aa, Artificial Sequence
  Synthetically generated peptide
  VARIANT (1)..(17): Xaa = Any Amino Acid
CCEYACNPACXXXXTGA

SEQ ID NO: 10213 - protein, 17 aa, Artificial Sequence
  Synthetically generated peptide
  VARIANT (1)..(17): Xaa = Any Amino Acid
CCEYACNPACXXXTXGA

SEQ ID NO: 10214 - protein, 17 aa, Artificial Sequence
  Synthetically generated peptide
  VARIANT (1)..(17): Xaa = Any Amino Acid
CCEYACNPACXXXTGXA

SEQ ID NO: 10215 - protein, 16 aa, Artificial Sequence
  Synthetically generated peptide
  VARIANT (1)..(16): Xaa = Any Amino Acid
CCEYACNPACXXTXGA

SEQ ID NO: 10216 - protein, 17 aa, Artificial Sequence
  Synthetically generated peptide
  VARIANT (1)..(17): Xaa = Any Amino Acid
CCEYACNPACXXTXXGA

SEQ ID NO: 10217 - protein, 17 aa, Artificial Sequence
  Synthetically generated peptide
  VARIANT (1)..(17): Xaa = Any Amino Acid
CCEYACNPACXXTXGXA

SEQ ID NO: 10218 - protein, 16 aa, Artificial Sequence
  Synthetically generated peptide
  VARIANT (1)..(16): Xaa = Any Amino Acid
CCEYACNPACXXTGXA

SEQ ID NO: 10219 - protein, 17 aa, Artificial Sequence
  Synthetically generated peptide
  VARIANT (1)..(17): Xaa = Any Amino Acid
CCEYACNPACXXTGXXA

SEQ ID NO: 10220 - protein, 15 aa, Artificial Sequence
  Synthetically generated peptide
  VARIANT (1)..(15): Xaa = Any Amino Acid
CCEYACNPACXTXGA

SEQ ID NO: 10221 - protein, 16 aa, Artificial Sequence
  Synthetically generated peptide
  VARIANT (1)..(16): Xaa = Any Amino Acid
CCEYACNPACXTXXGA

SEQ ID NO: 10222 - protein, 17 aa, Artificial Sequence
  Synthetically generated peptide
  VARIANT (1)..(17): Xaa = Any Amino Acid
CCEYACNPACXTXXXGA

SEQ ID NO: 10223 - protein, 17 aa, Artificial Sequence
  Synthetically generated peptide
  VARIANT (1)..(17): Xaa = Any Amino Acid
CCEYACNPACXTXXGXA

SEQ ID NO: 10224 - protein, 16 aa, Artificial Sequence
  Synthetically generated peptide
  VARIANT (1)..(16): Xaa = Any Amino Acid
CCEYACNPACXTXGXA

SEQ ID NO: 10225 - protein, 17 aa, Artificial Sequence
  Synthetically generated peptide
  VARIANT (1)..(17): Xaa = Any Amino Acid
CCEYACNPACXTXGXXA

SEQ ID NO: 10226 - protein, 15 aa, Artificial Sequence
  Synthetically generated peptide
  VARIANT (1)..(15): Xaa = Any Amino Acid
CCEYACNPACXTGXA

SEQ ID NO: 10227 - protein, 16 aa, Artificial Sequence
  Synthetically generated peptide
  VARIANT (1)..(16): Xaa = Any Amino Acid
CCEYACNPACXTGXXA

SEQ ID NO: 10228 - protein, 17 aa, Artificial Sequence
  Synthetically generated peptide
  VARIANT (1)..(17): Xaa = Any Amino Acid
CCEYACNPACXTGXXXA

SEQ ID NO: 10229 - protein, 14 aa, Artificial Sequence
  Synthetically generated peptide
  VARIANT (1)..(14): Xaa = Any Amino Acid
CCEYACNPACTXGA

SEQ ID NO: 10230 - protein, 15 aa, Artificial Sequence
  Synthetically generated peptide
  VARIANT (1)..(15): Xaa = Any Amino Acid
CCEYACNPACTXXGA

SEQ ID NO: 10231 - protein, 16 aa, Artificial Sequence
  Synthetically generated peptide
  VARIANT (1)..(16): Xaa = Any Amino Acid
CCEYACNPACTXXXGA

SEQ ID NO: 10232 - protein, 17 aa, Artificial Sequence
  Synthetically generated peptide
  VARIANT (1)..(17): Xaa = Any Amino Acid
CCEYACNPACTXXXXGA

SEQ ID NO: 10233 - protein, 17 aa, Artificial Sequence
  Synthetically generated peptide
  VARIANT (1)..(17): Xaa = Any Amino Acid
CCEYACNPACTXXXGXA

SEQ ID NO: 10234 - protein, 16 aa, Artificial Sequence
  Synthetically generated peptide
  VARIANT (1)..(16): Xaa = Any Amino Acid
CCEYACNPACTXXGXA

SEQ ID NO: 10235 - protein, 17 aa, Artificial Sequence
  Synthetically generated peptide
  VARIANT (1)..(17): Xaa = Any Amino Acid
CCEYACNPACTXXGXXA

SEQ ID NO: 10236 - protein, 15 aa, Artificial Sequence
  Synthetically generated peptide
  VARIANT (1)..(15): Xaa = Any Amino Acid
CCEYACNPACTXGXA

SEQ ID NO: 10237 - protein, 16 aa, Artificial Sequence
  Synthetically generated peptide
  VARIANT (1)..(16): Xaa = Any Amino Acid
CCEYACNPACTXGXXA

SEQ ID NO: 10238 - protein, 17 aa, Artificial Sequence
  Synthetically generated peptide
  VARIANT (1)..(17): Xaa = Any Amino Acid
CCEYACNPACTXGXXXA

SEQ ID NO: 10239 - protein, 14 aa, Artificial Sequence
  Synthetically generated peptide
  VARIANT (1)..(14): Xaa = Any Amino Acid
CCEYACNPACTGXA

SEQ ID NO: 10240 - protein, 15 aa, Artificial Sequence
  Synthetically generated peptide
  VARIANT (1)..(15): Xaa = Any Amino Acid
CCEYACNPACTGXXA

SEQ ID NO: 10241 - protein, 16 aa, Artificial Sequence
  Synthetically generated peptide
  VARIANT (1)..(16): Xaa = Any Amino Acid
CCEYACNPACTGXXXA

SEQ ID NO: 10242 - protein, 17 aa, Artificial Sequence
  Synthetically generated peptide
  VARIANT (1)..(17): Xaa = Any Amino Acid
CCEYACNPACTGXXXXA

SEQ ID NO: 10243 - protein, 14 aa, Artificial Sequence
  Synthetically generated peptide
  VARIANT (1)..(14): Xaa = Any Amino Acid
ACXEFCANPACTGC

SEQ ID NO: 10244 - protein, 15 aa, Artificial Sequence
  Synthetically generated peptide
  VARIANT (1)..(15): Xaa = Any Amino Acid
ACXXEFCANPACTGC

SEQ ID NO: 10245 - protein, 16 aa, Artificial Sequence
  Synthetically generated peptide
  VARIANT (1)..(16): Xaa = Any Amino Acid
ACXXXEFCANPACTGC

SEQ ID NO: 10246 - protein, 17 aa, Artificial Sequence
  Synthetically generated peptide
  VARIANT (1)..(17): Xaa = Any Amino Acid
ACXXXXEFCANPACTGC

SEQ ID NO: 10247 - protein, 17 aa, Artificial Sequence
  Synthetically generated peptide
  VARIANT (1)..(17): Xaa = Any Amino Acid
ACXXXEXFCANPACTGC

SEQ ID NO: 10248 - protein, 17 aa, Artificial Sequence
  Synthetically generated peptide
  VARIANT (1)..(17): Xaa = Any Amino Acid
ACXXXEFXCANPACTGC

SEQ ID NO: 10249 - protein, 17 aa, Artificial Sequence
  Synthetically generated peptide
  VARIANT (1)..(17): Xaa = Any Amino Acid
ACXXXEFCAXNPACTGC

SEQ ID NO: 10250 - protein, 17 aa, Artificial Sequence
  Synthetically generated peptide
  VARIANT (1)..(17): Xaa = Any Amino Acid
ACXXXEFCANXPACTGC

SEQ ID NO: 10251 - protein, 17 aa, Artificial Sequence
  Synthetically generated peptide
  VARIANT (1)..(17): Xaa = Any Amino Acid
ACXXXEFCANPXACTGC

SEQ ID NO: 10252 - protein, 17 aa, Artificial Sequence
  Synthetically generated peptide
  VARIANT (1)..(17): Xaa = Any Amino Acid
ACXXXEFCANPAXCTGC

SEQ ID NO: 10253 - protein, 17 aa, Artificial Sequence
  Synthetically generated peptide
  VARIANT (1)..(17): Xaa = Any Amino Acid
ACXXXEFCANPACXTGC

SEQ ID NO: 10254 - protein, 17 aa, Artificial Sequence
  Synthetically generated peptide
  VARIANT (1)..(17): Xaa = Any Amino Acid
ACXXXEFCANPACTXGC

SEQ ID NO: 10255 - protein, 17 aa, Artificial Sequence
  Synthetically generated peptide
  VARIANT (1)..(17): Xaa = Any Amino Acid
ACXXXEFCANPACTGXC

SEQ ID NO: 10256 - protein, 16 aa, Artificial Sequence
  Synthetically generated peptide
  VARIANT (1)..(16): Xaa = Any Amino Acid
ACXXEXFCANPACTGC

SEQ ID NO: 10257 - protein, 17 aa, Artificial Sequence
  Synthetically generated peptide
  VARIANT (1)..(17): Xaa = Any Amino Acid
ACXXEXXFCANPACTGC

SEQ ID NO: 10258 - protein, 17 aa, Artificial Sequence
  Synthetically generated peptide
  VARIANT (1)..(17): Xaa = Any Amino Acid
ACXXEXFXCANPACTGC

SEQ ID NO: 10259 - protein, 17 aa, Artificial Sequence
  Synthetically generated peptide
  VARIANT (1)..(17): Xaa = Any Amino Acid
ACXXEXFCAXNPACTGC

SEQ ID NO: 10260 - protein, 17 aa, Artificial Sequence
  Synthetically generated peptide
  VARIANT (1)..(17): Xaa = Any Amino Acid
ACXXEXFCANXPACTGC

SEQ ID NO: 10261 - protein, 17 aa, Artificial Sequence
  Synthetically generated peptide
  VARIANT (1)..(17): Xaa = Any Amino Acid
ACXXEXFCANPXACTGC

SEQ ID NO: 10262 - protein, 17 aa, Artificial Sequence
  Synthetically generated peptide
  VARIANT (1)..(17): Xaa = Any Amino Acid
ACXXEXFCANPAXCTGC

SEQ ID NO: 10263 - protein, 17 aa, Artificial Sequence
  Synthetically generated peptide
  VARIANT (1)..(17): Xaa = Any Amino Acid
ACXXEXFCANPACXTGC

SEQ ID NO: 10264 - protein, 17 aa, Artificial Sequence
  Synthetically generated peptide
  VARIANT (1)..(17): Xaa = Any Amino Acid
ACXXEXFCANPACTXGC

SEQ ID NO: 10265 - protein, 17 aa, Artificial Sequence
  Synthetically generated peptide
  VARIANT (1)..(17): Xaa = Any Amino Acid
ACXXEXFCANPACTGXC

SEQ ID NO: 10266 - protein, 16 aa, Artificial Sequence
  Synthetically generated peptide
  VARIANT (1)..(16): Xaa = Any Amino Acid
ACXXEFXCANPACTGC

SEQ ID NO: 10267 - protein, 17 aa, Artificial Sequence
  Synthetically generated peptide
  VARIANT (1)..(17): Xaa = Any Amino Acid
ACXXEFXXCANPACTGC

SEQ ID NO: 10268 - protein, 17 aa, Artificial Sequence
  Synthetically generated peptide
  VARIANT (1)..(17): Xaa = Any Amino Acid
ACXXEFXCAXNPACTGC

SEQ ID NO: 10269 - protein, 17 aa, Artificial Sequence
  Synthetically generated peptide
  VARIANT (1)..(17): Xaa = Any Amino Acid
ACXXEFXCANXPACTGC

SEQ ID NO: 10270 - protein, 17 aa, Artificial Sequence
  Synthetically generated peptide
  VARIANT (1)..(17): Xaa = Any Amino Acid
ACXXEFXCANPXACTGC

SEQ ID NO: 10271 - protein, 17 aa, Artificial Sequence
  Synthetically generated peptide
  VARIANT (1)..(17): Xaa = Any Amino Acid
ACXXEFXCANPAXCTGC

SEQ ID NO: 10272 - protein, 17 aa, Artificial Sequence
  Synthetically generated peptide
  VARIANT (1)..(17): Xaa = Any Amino Acid
ACXXEFXCANPACXTGC

SEQ ID NO: 10273 - protein, 17 aa, Artificial Sequence
  Synthetically generated peptide
  VARIANT (1)..(17): Xaa = Any Amino Acid
ACXXEFXCANPACTXGC

SEQ ID NO: 10274 - protein, 17 aa, Artificial Sequence
  Synthetically generated peptide
  VARIANT (1)..(17): Xaa = Any Amino Acid
ACXXEFXCANPACTGXC

SEQ ID NO: 10275 - protein, 16 aa, Artificial Sequence
  Synthetically generated peptide
  VARIANT (1)..(16): Xaa = Any Amino Acid
ACXXEFCAXNPACTGC

SEQ ID NO: 10276 - protein, 17 aa, Artificial Sequence
  Synthetically generated peptide
  VARIANT (1)..(17): Xaa = Any Amino Acid
ACXXEFCAXXNPACTGC

SEQ ID NO: 10277 - protein, 17 aa, Artificial Sequence
  Synthetically generated peptide
  VARIANT (1)..(17): Xaa = Any Amino Acid
ACXXEFCAXNXPACTGC

SEQ ID NO: 10278 - protein, 17 aa, Artificial Sequence
  Synthetically generated peptide
  VARIANT (1)..(17): Xaa = Any Amino Acid
ACXXEFCAXNPXACTGC

SEQ ID NO: 10279 - protein, 17 aa, Artificial Sequence
  Synthetically generated peptide
  VARIANT (1)..(17): Xaa = Any Amino Acid
ACXXEFCAXNPAXCTGC

SEQ ID NO: 10280 - protein, 17 aa, Artificial Sequence
  Synthetically generated peptide
  VARIANT (1)..(17): Xaa = Any Amino Acid
ACXXEFCAXNPACXTGC

SEQ ID NO: 10281 - protein, 17 aa, Artificial Sequence
  Synthetically generated peptide
  VARIANT (1)..(17): Xaa = Any Amino Acid
ACXXEFCAXNPACTXGC

SEQ ID NO: 10282 - protein, 17 aa, Artificial Sequence
  Synthetically generated peptide
  VARIANT (1)..(17): Xaa = Any Amino Acid
ACXXEFCAXNPACTGXC

SEQ ID NO: 10283 - protein, 16 aa, Artificial Sequence
  Synthetically generated peptide
  VARIANT (1)..(16): Xaa = Any Amino Acid
ACXXEFCANXPACTGC

SEQ ID NO: 10284 - protein, 17 aa, Artificial Sequence
  Synthetically generated peptide
  VARIANT (1)..(17): Xaa = Any Amino Acid
ACXXEFCANXXPACTGC

SEQ ID NO: 10285 - protein, 17 aa, Artificial Sequence
  Synthetically generated peptide
  VARIANT (1)..(17): Xaa = Any Amino Acid
ACXXEFCANXPXACTGC

SEQ ID NO: 10286 - protein, 17 aa, Artificial Sequence
  Synthetically generated peptide
  VARIANT (1)..(17): Xaa = Any Amino Acid
ACXXEFCANXPAXCTGC

SEQ ID NO: 10287 - protein, 17 aa, Artificial Sequence
  Synthetically generated peptide
  VARIANT (1)..(17): Xaa = Any Amino Acid
ACXXEFCANXPACXTGC

SEQ ID NO: 10288 - protein, 17 aa, Artificial Sequence
  Synthetically generated peptide
  VARIANT (1)..(17): Xaa = Any Amino Acid
ACXXEFCANXPACTXGC

SEQ ID NO: 10289 - protein, 17 aa, Artificial Sequence
  Synthetically generated peptide
  VARIANT (1)..(17): Xaa = Any Amino Acid
ACXXEFCANXPACTGXC

SEQ ID NO: 10290 - protein, 16 aa, Artificial Sequence
  Synthetically generated peptide
  VARIANT (1)..(16): Xaa = Any Amino Acid
ACXXEFCANPXACTGC

SEQ ID NO: 10291 - protein, 17 aa, Artificial Sequence
  Synthetically generated peptide
  VARIANT (1)..(17): Xaa = Any Amino Acid
ACXXEFCANPXXACTGC

SEQ ID NO: 10292 - protein, 17 aa, Artificial Sequence
  Synthetically generated peptide
  VARIANT (1)..(17): Xaa = Any Amino Acid
ACXXEFCANPXAXCTGC

SEQ ID NO: 10293 - protein, 17 aa, Artificial Sequence
  Synthetically generated peptide
  VARIANT (1)..(17): Xaa = Any Amino Acid
ACXXEFCANPXACXTGC

SEQ ID NO: 10294 - protein, 17 aa, Artificial Sequence
  Synthetically generated peptide
  VARIANT (1)..(17): Xaa = Any Amino Acid
ACXXEFCANPXACTXGC

SEQ ID NO: 10295 - protein, 17 aa, Artificial Sequence
  Synthetically generated peptide
  VARIANT (1)..(17): Xaa = Any Amino Acid
ACXXEFCANPXACTGXC

SEQ ID NO: 10296 - protein, 16 aa, Artificial Sequence
  Synthetically generated peptide
  VARIANT (1)..(16): Xaa = Any Amino Acid
ACXXEFCANPAXCTGC

SEQ ID NO: 10297 - protein, 17 aa, Artificial Sequence
  Synthetically generated peptide
  VARIANT (1)..(17): Xaa = Any Amino Acid
ACXXEFCANPAXXCTGC

SEQ ID NO: 10298 - protein, 17 aa, Artificial Sequence
  Synthetically generated peptide
  VARIANT (1)..(17): Xaa = Any Amino Acid
ACXXEFCANPAXCXTGC

SEQ ID NO: 10299 - protein, 17 aa, Artificial Sequence
  Synthetically generated peptide
  VARIANT (1)..(17): Xaa = Any Amino Acid
ACXXEFCANPAXCTXGC

SEQ ID NO: 10300 - protein, 17 aa, Artificial Sequence
  Synthetically generated peptide
  VARIANT (1)..(17): Xaa = Any Amino Acid
ACXXEFCANPAXCTGXC

SEQ ID NO: 10301 - protein, 16 aa, Artificial Sequence
  Synthetically generated peptide
  VARIANT (1)..(16): Xaa = Any Amino Acid
ACXXEFCANPACXTGC

SEQ ID NO: 10302 - protein, 17 aa, Artificial Sequence
  Synthetically generated peptide
  VARIANT (1)..(17): Xaa = Any Amino Acid
ACXXEFCANPACXXTGC

SEQ ID NO: 10303 - protein, 17 aa, Artificial Sequence
  Synthetically generated peptide
  VARIANT (1)..(17): Xaa = Any Amino Acid
ACXXEFCANPACXTXGC

SEQ ID NO: 10304 - protein, 17 aa, Artificial Sequence
  Synthetically generated peptide
  VARIANT (1)..(17): Xaa = Any Amino Acid
ACXXEFCANPACXTGXC

SEQ ID NO: 10305 - protein, 16 aa, Artificial Sequence
  Synthetically generated peptide
  VARIANT (1)..(16): Xaa = Any Amino Acid
ACXXEFCANPACTXGC

SEQ ID NO: 10306 - protein, 17 aa, Artificial Sequence
  Synthetically generated peptide
  VARIANT (1)..(17): Xaa = Any Amino Acid
ACXXEFCANPACTXXGC

SEQ ID NO: 10307 - protein, 17 aa, Artificial Sequence
  Synthetically generated peptide
  VARIANT (1)..(17): Xaa = Any Amino Acid
ACXXEFCANPACTXGXC

SEQ ID NO: 10308 - protein, 16 aa, Artificial Sequence
  Synthetically generated peptide
  VARIANT (1)..(16): Xaa = Any Amino Acid
ACXXEFCANPACTGXC

SEQ ID NO: 10309 - protein, 17 aa, Artificial Sequence
  Synthetically generated peptide
  VARIANT (1)..(17): Xaa = Any Amino Acid
ACXXEFCANPACTGXXC

SEQ ID NO: 10310 - protein, 15 aa, Artificial Sequence
  Synthetically generated peptide
  VARIANT (1)..(15): Xaa = Any Amino Acid
ACXEXFCANPACTGC

SEQ ID NO: 10311 - protein, 16 aa, Artificial Sequence
  Synthetically generated peptide
  VARIANT (1)..(16): Xaa = Any Amino Acid
ACXEXXFCANPACTGC

SEQ ID NO: 10312 - protein, 17 aa, Artificial Sequence
  Synthetically generated peptide
  VARIANT (1)..(17): Xaa = Any Amino Acid
ACXEXXXFCANPACTGC

SEQ ID NO: 10313 - protein, 17 aa, Artificial Sequence
  Synthetically generated peptide
  VARIANT (1)..(17): Xaa = Any Amino Acid
ACXEXXFXCANPACTGC

SEQ ID NO: 10314 - protein, 17 aa, Artificial Sequence
  Synthetically generated peptide
  VARIANT (1)..(17): Xaa = Any Amino Acid
ACXEXXFCAXNPACTGC

SEQ ID NO: 10315 - protein, 17 aa, Artificial Sequence
  Synthetically generated peptide
  VARIANT (1)..(17): Xaa = Any Amino Acid
ACXEXXFCANXPACTGC

SEQ ID NO: 10316 - protein, 17 aa, Artificial Sequence
  Synthetically generated peptide
  VARIANT (1)..(17): Xaa = Any Amino Acid
ACXEXXFCANPXACTGC

SEQ ID NO: 10317 - protein, 17 aa, Artificial Sequence
  Synthetically generated peptide
  VARIANT (1)..(17): Xaa = Any Amino Acid
ACXEXXFCANPAXCTGC

SEQ ID NO: 10318 - protein, 17 aa, Artificial Sequence
  Synthetically generated peptide
  VARIANT (1)..(17): Xaa = Any Amino Acid
ACXEXXFCANPACXTGC

SEQ ID NO: 10319 - protein, 17 aa, Artificial Sequence
  Synthetically generated peptide
  VARIANT (1)..(17): Xaa = Any Amino Acid
ACXEXXFCANPACTXGC

SEQ ID NO: 10320 - protein, 17 aa, Artificial Sequence
  Synthetically generated peptide
  VARIANT (1)..(17): Xaa = Any Amino Acid
ACXEXXFCANPACTGXC

SEQ ID NO: 10321 - protein, 16 aa, Artificial Sequence
  Synthetically generated peptide
  VARIANT (1)..(16): Xaa = Any Amino Acid
ACXEXFXCANPACTGC

SEQ ID NO: 10322 - protein, 17 aa, Artificial Sequence
  Synthetically generated peptide
  VARIANT (1)..(17): Xaa = Any Amino Acid
ACXEXFXXCANPACTGC

SEQ ID NO: 10323 - protein, 17 aa, Artificial Sequence
  Synthetically generated peptide
  VARIANT (1)..(17): Xaa = Any Amino Acid
ACXEXFXCAXNPACTGC

SEQ ID NO: 10324 - protein, 17 aa, Artificial Sequence
  Synthetically generated peptide
  VARIANT (1)..(17): Xaa = Any Amino Acid
ACXEXFXCANXPACTGC

SEQ ID NO: 10325 - protein, 17 aa, Artificial Sequence
  Synthetically generated peptide
  VARIANT (1)..(17): Xaa = Any Amino Acid
ACXEXFXCANPXACTGC

SEQ ID NO: 10326 - protein, 17 aa, Artificial Sequence
  Synthetically generated peptide
  VARIANT (1)..(17): Xaa = Any Amino Acid
ACXEXFXCANPAXCTGC

SEQ ID NO: 10327 - protein, 17 aa, Artificial Sequence
  Synthetically generated peptide
  VARIANT (1)..(17): Xaa = Any Amino Acid
ACXEXFXCANPACXTGC

SEQ ID NO: 10328 - protein, 17 aa, Artificial Sequence
  Synthetically generated peptide
  VARIANT (1)..(17): Xaa = Any Amino Acid
ACXEXFXCANPACTXGC

SEQ ID NO: 10329 - protein, 17 aa, Artificial Sequence
  Synthetically generated peptide
  VARIANT (1)..(17): Xaa = Any Amino Acid
ACXEXFXCANPACTGXC

SEQ ID NO: 10330 - protein, 16 aa, Artificial Sequence
  Synthetically generated peptide
  VARIANT (1)..(16): Xaa = Any Amino Acid
ACXEXFCAXNPACTGC

SEQ ID NO: 10331 - protein, 17 aa, Artificial Sequence
  Synthetically generated peptide
  VARIANT (1)..(17): Xaa = Any Amino Acid
ACXEXFCAXXNPACTGC

SEQ ID NO: 10332 - protein, 17 aa, Artificial Sequence
  Synthetically generated peptide
  VARIANT (1)..(17): Xaa = Any Amino Acid
ACXEXFCAXNXPACTGC

SEQ ID NO: 10333 - protein, 17 aa, Artificial Sequence
  Synthetically generated peptide
  VARIANT (1)..(17): Xaa = Any Amino Acid
ACXEXFCAXNPXACTGC

SEQ ID NO: 10334 - protein, 17 aa, Artificial Sequence
  Synthetically generated peptide
  VARIANT (1)..(17): Xaa = Any Amino Acid
ACXEXFCAXNPAXCTGC

SEQ ID NO: 10335 - protein, 17 aa, Artificial Sequence
  Synthetically generated peptide
  VARIANT (1)..(17): Xaa = Any Amino Acid
ACXEXFCAXNPACXTGC

SEQ ID NO: 10336 - protein, 17 aa, Artificial Sequence
  Synthetically generated peptide
  VARIANT (1)..(17): Xaa = Any Amino Acid
ACXEXFCAXNPACTXGC

SEQ ID NO: 10337 - protein, 17 aa, Artificial Sequence
  Synthetically generated peptide
  VARIANT (1)..(17): Xaa = Any Amino Acid
ACXEXFCAXNPACTGXC

SEQ ID NO: 10338 - protein, 16 aa, Artificial Sequence
  Synthetically generated peptide
  VARIANT (1)..(16): Xaa = Any Amino Acid
ACXEXFCANXPACTGC

SEQ ID NO: 10339 - protein, 17 aa, Artificial Sequence
  Synthetically generated peptide
  VARIANT (1)..(17): Xaa = Any Amino Acid
ACXEXFCANXXPACTGC

SEQ ID NO: 10340 - protein, 17 aa, Artificial Sequence
  Synthetically generated peptide
  VARIANT (1)..(17): Xaa = Any Amino Acid
ACXEXFCANXPXACTGC

SEQ ID NO: 10341 - protein, 17 aa, Artificial Sequence
  Synthetically generated peptide
  VARIANT (1)..(17): Xaa = Any Amino Acid
ACXEXFCANXPAXCTGC

SEQ ID NO: 10342 - protein, 17 aa, Artificial Sequence
  Synthetically generated peptide
  VARIANT (1)..(17): Xaa = Any Amino Acid
ACXEXFCANXPACXTGC

SEQ ID NO: 10343 - protein, 17 aa, Artificial Sequence
  Synthetically generated peptide
  VARIANT (1)..(17): Xaa = Any Amino Acid
ACXEXFCANXPACTXGC

SEQ ID NO: 10344 - protein, 17 aa, Artificial Sequence
  Synthetically generated peptide
  VARIANT (1)..(17): Xaa = Any Amino Acid
ACXEXFCANXPACTGXC

SEQ ID NO: 10345 - protein, 16 aa, Artificial Sequence
  Synthetically generated peptide
  VARIANT (1)..(16): Xaa = Any Amino Acid
ACXEXFCANPXACTGC

SEQ ID NO: 10346 - protein, 17 aa, Artificial Sequence
  Synthetically generated peptide
  VARIANT (1)..(17): Xaa = Any Amino Acid
ACXEXFCANPXXACTGC

SEQ ID NO: 10347 - protein, 17 aa, Artificial Sequence
  Synthetically generated peptide
  VARIANT (1)..(17): Xaa = Any Amino Acid
ACXEXFCANPXAXCTGC

SEQ ID NO: 10348 - protein, 17 aa, Artificial Sequence
  Synthetically generated peptide
  VARIANT (1)..(17): Xaa = Any Amino Acid
ACXEXFCANPXACXTGC

SEQ ID NO: 10349 - protein, 17 aa, Artificial Sequence
  Synthetically generated peptide
  VARIANT (1)..(17): Xaa = Any Amino Acid
ACXEXFCANPXACTXGC

SEQ ID NO: 10350 - protein, 17 aa, Artificial Sequence
  Synthetically generated peptide
  VARIANT (1)..(17): Xaa = Any Amino Acid
ACXEXFCANPXACTGXC

SEQ ID NO: 10351 - protein, 16 aa, Artificial Sequence
  Synthetically generated peptide
  VARIANT (1)..(16): Xaa = Any Amino Acid
ACXEXFCANPAXCTGC

SEQ ID NO: 10352 - protein, 17 aa, Artificial Sequence
  Synthetically generated peptide
  VARIANT (1)..(17): Xaa = Any Amino Acid
ACXEXFCANPAXXCTGC

SEQ ID NO: 10353 - protein, 17 aa, Artificial Sequence
  Synthetically generated peptide
  VARIANT (1)..(17): Xaa = Any Amino Acid
ACXEXFCANPAXCXTGC

SEQ ID NO: 10354 - protein, 17 aa, Artificial Sequence
  Synthetically generated peptide
  VARIANT (1)..(17): Xaa = Any Amino Acid
ACXEXFCANPAXCTXGC

SEQ ID NO: 10355 - protein, 17 aa, Artificial Sequence
  Synthetically generated peptide
  VARIANT (1)..(17): Xaa = Any Amino Acid
ACXEXFCANPAXCTGXC

SEQ ID NO: 10356 - protein, 16 aa, Artificial Sequence
  Synthetically generated peptide
  VARIANT (1)..(16): Xaa = Any Amino Acid
ACXEXFCANPACXTGC

SEQ ID NO: 10357 - protein, 17 aa, Artificial Sequence
  Synthetically generated peptide
  VARIANT (1)..(17): Xaa = Any Amino Acid
ACXEXFCANPACXXTGC

SEQ ID NO: 10358 - protein, 17 aa, Artificial Sequence
  Synthetically generated peptide
  VARIANT (1)..(17): Xaa = Any Amino Acid
ACXEXFCANPACXTXGC

SEQ ID NO: 10359 - protein, 17 aa, Artificial Sequence
  Synthetically generated peptide
  VARIANT (1)..(17): Xaa = Any Amino Acid
ACXEXFCANPACXTGXC

SEQ ID NO: 10360 - protein, 16 aa, Artificial Sequence
  Synthetically generated peptide
  VARIANT (1)..(16): Xaa = Any Amino Acid
ACXEXFCANPACTXGC

SEQ ID NO: 10361 - protein, 17 aa, Artificial Sequence
  Synthetically generated peptide
  VARIANT (1)..(17): Xaa = Any Amino Acid
ACXEXFCANPACTXXGC

SEQ ID NO: 10362 - protein, 17 aa, Artificial Sequence
  Synthetically generated peptide
  VARIANT (1)..(17): Xaa = Any Amino Acid
ACXEXFCANPACTXGXC

SEQ ID NO: 10363 - protein, 16 aa, Artificial Sequence
  Synthetically generated peptide
  VARIANT (1)..(16): Xaa = Any Amino Acid
ACXEXFCANPACTGXC

SEQ ID NO: 10364 - protein, 17 aa, Artificial Sequence
  Synthetically generated peptide
  VARIANT (1)..(17): Xaa = Any Amino Acid
ACXEXFCANPACTGXXC

SEQ ID NO: 10365 - protein, 15 aa, Artificial Sequence
  Synthetically generated peptide
  VARIANT (1)..(15): Xaa = Any Amino Acid
ACXEFXCANPACTGC

SEQ ID NO: 10366 - protein, 16 aa, Artificial Sequence
  Synthetically generated peptide
  VARIANT (1)..(16): Xaa = Any Amino Acid
ACXEFXXCANPACTGC

SEQ ID NO: 10367 - protein, 17 aa, Artificial Sequence
  Synthetically generated peptide
  VARIANT (1)..(17): Xaa = Any Amino Acid
ACXEFXXXCANPACTGC

SEQ ID NO: 10368 - protein, 17 aa, Artificial Sequence
  Synthetically generated peptide
  VARIANT (1)..(17): Xaa = Any Amino Acid
ACXEFXXCAXNPACTGC

SEQ ID NO: 10369 - protein, 17 aa, Artificial Sequence
  Synthetically generated peptide
  VARIANT (1)..(17): Xaa = Any Amino Acid
ACXEFXXCANXPACTGC

SEQ ID NO: 10370 - protein, 17 aa, Artificial Sequence
  Synthetically generated peptide
  VARIANT (1)..(17): Xaa = Any Amino Acid
ACXEFXXCANPXACTGC

SEQ ID NO: 10371 - protein, 17 aa, Artificial Sequence
  Synthetically generated peptide
  VARIANT (1)..(17): Xaa = Any Amino Acid
ACXEFXXCANPAXCTGC

SEQ ID NO: 10372 - protein, 17 aa, Artificial Sequence
  Synthetically generated peptide
  VARIANT (1)..(17): Xaa = Any Amino Acid
ACXEFXXCANPACXTGC

SEQ ID NO: 10373 - protein, 17 aa, Artificial Sequence
  Synthetically generated peptide
  VARIANT (1)..(17): Xaa = Any Amino Acid
ACXEFXXCANPACTXGC

SEQ ID NO: 10374 - protein, 17 aa, Artificial Sequence
  Synthetically generated peptide
  VARIANT (1)..(17): Xaa = Any Amino Acid
ACXEFXXCANPACTGXC

SEQ ID NO: 10375 - protein, 16 aa, Artificial Sequence
  Synthetically generated peptide
  VARIANT (1)..(16): Xaa = Any Amino Acid
ACXEFXCAXNPACTGC

SEQ ID NO: 10376 - protein, 17 aa, Artificial Sequence
  Synthetically generated peptide
  VARIANT (1)..(17): Xaa = Any Amino Acid
ACXEFXCAXXNPACTGC

SEQ ID NO: 10377 - protein, 17 aa, Artificial Sequence
  Synthetically generated peptide
  VARIANT (1)..(17): Xaa = Any Amino Acid
ACXEFXCAXNXPACTGC

SEQ ID NO: 10378 - protein, 17 aa, Artificial Sequence
  Synthetically generated peptide
  VARIANT (1)..(17): Xaa = Any Amino Acid
ACXEFXCAXNPXACTGC

SEQ ID NO: 10379 - protein, 17 aa, Artificial Sequence
  Synthetically generated peptide
  VARIANT (1)..(17): Xaa = Any Amino Acid
ACXEFXCAXNPAXCTGC

SEQ ID NO: 10380 - protein, 17 aa, Artificial Sequence
  Synthetically generated peptide
  VARIANT (1)..(17): Xaa = Any Amino Acid
ACXEFXCAXNPACXTGC

SEQ ID NO: 10381 - protein, 17 aa, Artificial Sequence
  Synthetically generated peptide
  VARIANT (1)..(17): Xaa = Any Amino Acid
ACXEFXCAXNPACTXGC

SEQ ID NO: 10382 - protein, 17 aa, Artificial Sequence
  Synthetically generated peptide
  VARIANT (1)..(17): Xaa = Any Amino Acid
ACXEFXCAXNPACTGXC

SEQ ID NO: 10383 - protein, 16 aa, Artificial Sequence
  Synthetically generated peptide
  VARIANT (1)..(16): Xaa = Any Amino Acid
ACXEFXCANXPACTGC

SEQ ID NO: 10384 - protein, 17 aa, Artificial Sequence
  Synthetically generated peptide
  VARIANT (1)..(17): Xaa = Any Amino Acid
ACXEFXCANXXPACTGC

SEQ ID NO: 10385 - protein, 17 aa, Artificial Sequence
  Synthetically generated peptide
  VARIANT (1)..(17): Xaa = Any Amino Acid
ACXEFXCANXPXACTGC

SEQ ID NO: 10386 - protein, 17 aa, Artificial Sequence
  Synthetically generated peptide
  VARIANT (1)..(17): Xaa = Any Amino Acid
ACXEFXCANXPAXCTGC

SEQ ID NO: 10387 - protein, 17 aa, Artificial Sequence
  Synthetically generated peptide
  VARIANT (1)..(17): Xaa = Any Amino Acid
ACXEFXCANXPACXTGC

SEQ ID NO: 10388 - protein, 17 aa, Artificial Sequence
  Synthetically generated peptide
  VARIANT (1)..(17): Xaa = Any Amino Acid
ACXEFXCANXPACTXGC

SEQ ID NO: 10389 - protein, 17 aa, Artificial Sequence
  Synthetically generated peptide
  VARIANT (1)..(17): Xaa = Any Amino Acid
ACXEFXCANXPACTGXC

SEQ ID NO: 10390 - protein, 16 aa, Artificial Sequence
  Synthetically generated peptide
  VARIANT (1)..(16): Xaa = Any Amino Acid
ACXEFXCANPXACTGC

SEQ ID NO: 10391 - protein, 17 aa, Artificial Sequence
  Synthetically generated peptide
  VARIANT (1)..(17): Xaa = Any Amino Acid
ACXEFXCANPXXACTGC

SEQ ID NO: 10392 - protein, 17 aa, Artificial Sequence
  Synthetically generated peptide
  VARIANT (1)..(17): Xaa = Any Amino Acid
ACXEFXCANPXAXCTGC

SEQ ID NO: 10393 - protein, 17 aa, Artificial Sequence
  Synthetically generated peptide
  VARIANT (1)..(17): Xaa = Any Amino Acid
ACXEFXCANPXACXTGC

SEQ ID NO: 10394 - protein, 17 aa, Artificial Sequence
  Synthetically generated peptide
  VARIANT (1)..(17): Xaa = Any Amino Acid
ACXEFXCANPXACTXGC

SEQ ID NO: 10395 - protein, 17 aa, Artificial Sequence
  Synthetically generated peptide
  VARIANT (1)..(17): Xaa = Any Amino Acid
ACXEFXCANPXACTGXC

SEQ ID NO: 10396 - protein, 16 aa, Artificial Sequence
  Synthetically generated peptide
  VARIANT (1)..(16): Xaa = Any Amino Acid
ACXEFXCANPAXCTGC

SEQ ID NO: 10397 - protein, 17 aa, Artificial Sequence
  Synthetically generated peptide
  VARIANT (1)..(17): Xaa = Any Amino Acid
ACXEFXCANPAXXCTGC

SEQ ID NO: 10398 - protein, 17 aa, Artificial Sequence
  Synthetically generated peptide
  VARIANT (1)..(17): Xaa = Any Amino Acid
ACXEFXCANPAXCXTGC

SEQ ID NO: 10399 - protein, 17 aa, Artificial Sequence
  Synthetically generated peptide
  VARIANT (1)..(17): Xaa = Any Amino Acid
ACXEFXCANPAXCTXGC

SEQ ID NO: 10400 - protein, 17 aa, Artificial Sequence
  Synthetically generated peptide
  VARIANT (1)..(17): Xaa = Any Amino Acid
ACXEFXCANPAXCTGXC

SEQ ID NO: 10401 - protein, 16 aa, Artificial Sequence
  Synthetically generated peptide
  VARIANT (1)..(16): Xaa = Any Amino Acid
ACXEFXCANPACXTGC

SEQ ID NO: 10402 - protein, 17 aa, Artificial Sequence
  Synthetically generated peptide
  VARIANT (1)..(17): Xaa = Any Amino Acid
ACXEFXCANPACXXTGC

SEQ ID NO: 10403 - protein, 17 aa, Artificial Sequence
  Synthetically generated peptide
  VARIANT (1)..(17): Xaa = Any Amino Acid
ACXEFXCANPACXTXGC

SEQ ID NO: 10404 - protein, 17 aa, Artificial Sequence
  Synthetically generated peptide
  VARIANT (1)..(17): Xaa = Any Amino Acid
ACXEFXCANPACXTGXC

SEQ ID NO: 10405 - protein, 16 aa, Artificial Sequence
  Synthetically generated peptide
  VARIANT (1)..(16): Xaa = Any Amino Acid
ACXEFXCANPACTXGC

SEQ ID NO: 10406 - protein, 17 aa, Artificial Sequence
  Synthetically generated peptide
  VARIANT (1)..(17): Xaa = Any Amino Acid
ACXEFXCANPACTXXGC

SEQ ID NO: 10407 - protein, 17 aa, Artificial Sequence
  Synthetically generated peptide
  VARIANT (1)..(17): Xaa = Any Amino Acid
ACXEFXCANPACTXGXC

SEQ ID NO: 10408 - protein, 16 aa, Artificial Sequence
  Synthetically generated peptide
  VARIANT (1)..(16): Xaa = Any Amino Acid
ACXEFXCANPACTGXC

SEQ ID NO: 10409 - protein, 17 aa, Artificial Sequence
  Synthetically generated peptide
  VARIANT (1)..(17): Xaa = Any Amino Acid
ACXEFXCANPACTGXXC

SEQ ID NO: 10410 - protein, 15 aa, Artificial Sequence
  Synthetically generated peptide
  VARIANT (1)..(15): Xaa = Any Amino Acid
ACXEFCAXNPACTGC

SEQ ID NO: 10411 - protein, 16 aa, Artificial Sequence
  Synthetically generated peptide
  VARIANT (1)..(16): Xaa = Any Amino Acid
ACXEFCAXXNPACTGC

SEQ ID NO: 10412 - protein, 17 aa, Artificial Sequence
  Synthetically generated peptide
  VARIANT (1)..(17): Xaa = Any Amino Acid
ACXEFCAXXXNPACTGC

SEQ ID NO: 10413 - protein, 17 aa, Artificial Sequence
  Synthetically generated peptide
  VARIANT (1)..(17): Xaa = Any Amino Acid
ACXEFCAXXNXPACTGC

SEQ ID NO: 10414 - protein, 17 aa, Artificial Sequence
  Synthetically generated peptide
  VARIANT (1)..(17): Xaa = Any Amino Acid
ACXEFCAXXNPXACTGC

SEQ ID NO: 10415 - protein, 17 aa, Artificial Sequence
  Synthetically generated peptide
  VARIANT (1)..(17): Xaa = Any Amino Acid
ACXEFCAXXNPAXCTGC

SEQ ID NO: 10416 - protein, 17 aa, Artificial Sequence
  Synthetically generated peptide
  VARIANT (1)..(17): Xaa = Any Amino Acid
ACXEFCAXXNPACXTGC

SEQ ID NO: 10417 - protein, 17 aa, Artificial Sequence
  Synthetically generated peptide
  VARIANT (1)..(17): Xaa = Any Amino Acid
ACXEFCAXXNPACTXGC

SEQ ID NO: 10418 - protein, 17 aa, Artificial Sequence
  Synthetically generated peptide
  VARIANT (1)..(17): Xaa = Any Amino Acid
ACXEFCAXXNPACTGXC

SEQ ID NO: 10419 - protein, 16 aa, Artificial Sequence
  Synthetically generated peptide
  VARIANT (1)..(16): Xaa = Any Amino Acid
ACXEFCAXNXPACTGC

SEQ ID NO: 10420 - protein, 17 aa, Artificial Sequence
  Synthetically generated peptide
  VARIANT (1)..(17): Xaa = Any Amino Acid
ACXEFCAXNXXPACTGC

SEQ ID NO: 10421 - protein, 17 aa, Artificial Sequence
  Synthetically generated peptide
  VARIANT (1)..(17): Xaa = Any Amino Acid
ACXEFCAXNXPXACTGC

SEQ ID NO: 10422 - protein, 17 aa, Artificial Sequence
  Synthetically generated peptide
  VARIANT (1)..(17): Xaa = Any Amino Acid
ACXEFCAXNXPAXCTGC

SEQ ID NO: 10423 - protein, 17 aa, Artificial Sequence
  Synthetically generated peptide
  VARIANT (1)..(17): Xaa = Any Amino Acid
ACXEFCAXNXPACXTGC

SEQ ID NO: 10424 - protein, 17 aa, Artificial Sequence
  Synthetically generated peptide
  VARIANT (1)..(17): Xaa = Any Amino Acid
ACXEFCAXNXPACTXGC

SEQ ID NO: 10425 - protein, 17 aa, Artificial Sequence
  Synthetically generated peptide
  VARIANT (1)..(17): Xaa = Any Amino Acid
ACXEFCAXNXPACTGXC

SEQ ID NO: 10426 - protein, 16 aa, Artificial Sequence
  Synthetically generated peptide
  VARIANT (1)..(16): Xaa = Any Amino Acid
ACXEFCAXNPXACTGC

SEQ ID NO: 10427 - protein, 17 aa, Artificial Sequence
  Synthetically generated peptide
  VARIANT (1)..(17): Xaa = Any Amino Acid
ACXEFCAXNPXXACTGC

SEQ ID NO: 10428 - protein, 17 aa, Artificial Sequence
  Synthetically generated peptide
  VARIANT (1)..(17): Xaa = Any Amino Acid
ACXEFCAXNPXAXCTGC

SEQ ID NO: 10429 - protein, 17 aa, Artificial Sequence
  Synthetically generated peptide
  VARIANT (1)..(17): Xaa = Any Amino Acid
ACXEFCAXNPXACXTGC

SEQ ID NO: 10430 - protein, 17 aa, Artificial Sequence
  Synthetically generated peptide
  VARIANT (1)..(17): Xaa = Any Amino Acid
ACXEFCAXNPXACTXGC

SEQ ID NO: 10431 - protein, 17 aa, Artificial Sequence
  Synthetically generated peptide
  VARIANT (1)..(17): Xaa = Any Amino Acid
ACXEFCAXNPXACTGXC

SEQ ID NO: 10432 - protein, 16 aa, Artificial Sequence
  Synthetically generated peptide
  VARIANT (1)..(16): Xaa = Any Amino Acid
ACXEFCAXNPAXCTGC

SEQ ID NO: 10433 - protein, 17 aa, Artificial Sequence
  Synthetically generated peptide
  VARIANT (1)..(17): Xaa = Any Amino Acid
ACXEFCAXNPAXXCTGC

SEQ ID NO: 10434 - protein, 17 aa, Artificial Sequence
  Synthetically generated peptide
  VARIANT (1)..(17): Xaa = Any Amino Acid
ACXEFCAXNPAXCXTGC

SEQ ID NO: 10435 - protein, 17 aa, Artificial Sequence
  Synthetically generated peptide
  VARIANT (1)..(17): Xaa = Any Amino Acid
ACXEFCAXNPAXCTXGC

SEQ ID NO: 10436 - protein, 17 aa, Artificial Sequence
  Synthetically generated peptide
  VARIANT (1)..(17): Xaa = Any Amino Acid
ACXEFCAXNPAXCTGXC

SEQ ID NO: 10437 - protein, 16 aa, Artificial Sequence
  Synthetically generated peptide
  VARIANT (1)..(16): Xaa = Any Amino Acid
ACXEFCAXNPACXTGC

SEQ ID NO: 10438 - protein, 17 aa, Artificial Sequence
  Synthetically generated peptide
  VARIANT (1)..(17): Xaa = Any Amino Acid
ACXEFCAXNPACXXTGC

SEQ ID NO: 10439 - protein, 17 aa, Artificial Sequence
  Synthetically generated peptide
  VARIANT (1)..(17): Xaa = Any Amino Acid
ACXEFCAXNPACXTXGC

SEQ ID NO: 10440 - protein, 17 aa, Artificial Sequence
  Synthetically generated peptide
  VARIANT (1)..(17): Xaa = Any Amino Acid
ACXEFCAXNPACXTGXC

SEQ ID NO: 10441 - protein, 16 aa, Artificial Sequence
  Synthetically generated peptide
  VARIANT (1)..(16): Xaa = Any Amino Acid
ACXEFCAXNPACTXGC

SEQ ID NO: 10442 - protein, 17 aa, Artificial Sequence
  Synthetically generated peptide
  VARIANT (1)..(17): Xaa = Any Amino Acid
ACXEFCAXNPACTXXGC

SEQ ID NO: 10443 - protein, 17 aa, Artificial Sequence
  Synthetically generated peptide
  VARIANT (1)..(17): Xaa = Any Amino Acid
ACXEFCAXNPACTXGXC

SEQ ID NO: 10444 - protein, 16 aa, Artificial Sequence
  Synthetically generated peptide
  VARIANT (1)..(16): Xaa = Any Amino Acid
ACXEFCAXNPACTGXC

SEQ ID NO: 10445 - protein, 17 aa, Artificial Sequence
  Synthetically generated peptide
  VARIANT (1)..(17): Xaa = Any Amino Acid
ACXEFCAXNPACTGXXC

SEQ ID NO: 10446 - protein, 15 aa, Artificial Sequence
  Synthetically generated peptide
  VARIANT (1)..(15): Xaa = Any Amino Acid
ACXEFCANXPACTGC

SEQ ID NO: 10447 - protein, 16 aa, Artificial Sequence
  Synthetically generated peptide
  VARIANT (1)..(16): Xaa = Any Amino Acid
ACXEFCANXXPACTGC

SEQ ID NO: 10448 - protein, 17 aa, Artificial Sequence
  Synthetically generated peptide
  VARIANT (1)..(17): Xaa = Any Amino Acid
ACXEFCANXXXPACTGC

SEQ ID NO: 10449 - protein, 17 aa, Artificial Sequence
  Synthetically generated peptide
  VARIANT (1)..(17): Xaa = Any Amino Acid
ACXEFCANXXPXACTGC

SEQ ID NO: 10450 - protein, 17 aa, Artificial Sequence
  Synthetically generated peptide
  VARIANT (1)..(17): Xaa = Any Amino Acid
ACXEFCANXXPAXCTGC

SEQ ID NO: 10451 - protein, 17 aa, Artificial Sequence
  Synthetically generated peptide
  VARIANT (1)..(17): Xaa = Any Amino Acid
ACXEFCANXXPACXTGC

SEQ ID NO: 10452 - protein, 17 aa, Artificial Sequence
  Synthetically generated peptide
  VARIANT (1)..(17): Xaa = Any Amino Acid
ACXEFCANXXPACTXGC

SEQ ID NO: 10453 - protein, 17 aa, Artificial Sequence
  Synthetically generated peptide
  VARIANT (1)..(17): Xaa = Any Amino Acid
ACXEFCANXXPACTGXC

SEQ ID NO: 10454 - protein, 16 aa, Artificial Sequence
  Synthetically generated peptide
  VARIANT (1)..(16): Xaa = Any Amino Acid
ACXEFCANXPXACTGC

SEQ ID NO: 10455 - protein, 17 aa, Artificial Sequence
  Synthetically generated peptide
  VARIANT (1)..(17): Xaa = Any Amino Acid
ACXEFCANXPXXACTGC

SEQ ID NO: 10456 - protein, 17 aa, Artificial Sequence
  Synthetically generated peptide
  VARIANT (1)..(17): Xaa = Any Amino Acid
ACXEFCANXPXAXCTGC

SEQ ID NO: 10457 - protein, 17 aa, Artificial Sequence
  Synthetically generated peptide
  VARIANT (1)..(17): Xaa = Any Amino Acid
ACXEFCANXPXACXTGC

SEQ ID NO: 10458 - protein, 17 aa, Artificial Sequence
  Synthetically generated peptide
  VARIANT (1)..(17): Xaa = Any Amino Acid
ACXEFCANXPXACTXGC

SEQ ID NO: 10459 - protein, 17 aa, Artificial Sequence
  Synthetically generated peptide
  VARIANT (1)..(17): Xaa = Any Amino Acid
ACXEFCANXPXACTGXC

SEQ ID NO: 10460 - protein, 16 aa, Artificial Sequence
  Synthetically generated peptide
  VARIANT (1)..(16): Xaa = Any Amino Acid
ACXEFCANXPAXCTGC

SEQ ID NO: 10461 - protein, 17 aa, Artificial Sequence
  Synthetically generated peptide
  VARIANT (1)..(17): Xaa = Any Amino Acid
ACXEFCANXPAXXCTGC

SEQ ID NO: 10462 - protein, 17 aa, Artificial Sequence
  Synthetically generated peptide
  VARIANT (1)..(17): Xaa = Any Amino Acid
ACXEFCANXPAXCXTGC

SEQ ID NO: 10463 - protein, 17 aa, Artificial Sequence
  Synthetically generated peptide
  VARIANT (1)..(17): Xaa = Any Amino Acid
ACXEFCANXPAXCTXGC

SEQ ID NO: 10464 - protein, 17 aa, Artificial Sequence
  Synthetically generated peptide
  VARIANT (1)..(17): Xaa = Any Amino Acid
ACXEFCANXPAXCTGXC

SEQ ID NO: 10465 - protein, 16 aa, Artificial Sequence
  Synthetically generated peptide
  VARIANT (1)..(16): Xaa = Any Amino Acid
ACXEFCANXPACXTGC

SEQ ID NO: 10466 - protein, 17 aa, Artificial Sequence
  Synthetically generated peptide
  VARIANT (1)..(17): Xaa = Any Amino Acid
ACXEFCANXPACXXTGC

SEQ ID NO: 10467 - protein, 17 aa, Artificial Sequence
  Synthetically generated peptide
  VARIANT (1)..(17): Xaa = Any Amino Acid
ACXEFCANXPACXTXGC

SEQ ID NO: 10468 - protein, 17 aa, Artificial Sequence
  Synthetically generated peptide
  VARIANT (1)..(17): Xaa = Any Amino Acid
ACXEFCANXPACXTGXC

SEQ ID NO: 10469 - protein, 16 aa, Artificial Sequence
  Synthetically generated peptide
  VARIANT (1)..(16): Xaa = Any Amino Acid
ACXEFCANXPACTXGC

SEQ ID NO: 10470 - protein, 17 aa, Artificial Sequence
  Synthetically generated peptide
  VARIANT (1)..(17): Xaa = Any Amino Acid
ACXEFCANXPACTXXGC

SEQ ID NO: 10471 - protein, 17 aa, Artificial Sequence
  Synthetically generated peptide
  VARIANT (1)..(17): Xaa = Any Amino Acid
ACXEFCANXPACTXGXC

SEQ ID NO: 10472 - protein, 16 aa, Artificial Sequence
  Synthetically generated peptide
  VARIANT (1)..(16): Xaa = Any Amino Acid
ACXEFCANXPACTGXC

SEQ ID NO: 10473 - protein, 17 aa, Artificial Sequence
  Synthetically generated peptide
  VARIANT (1)..(17): Xaa = Any Amino Acid
ACXEFCANXPACTGXXC

SEQ ID NO: 10474 - protein, 15 aa, Artificial Sequence
  Synthetically generated peptide
  VARIANT (1)..(15): Xaa = Any Amino Acid
ACXEFCANPXACTGC

SEQ ID NO: 10475 - protein, 16 aa, Artificial Sequence
  Synthetically generated peptide
  VARIANT (1)..(16): Xaa = Any Amino Acid
ACXEFCANPXXACTGC

SEQ ID NO: 10476 - protein, 17 aa, Artificial Sequence
  Synthetically generated peptide
  VARIANT (1)..(17): Xaa = Any Amino Acid
ACXEFCANPXXXACTGC

SEQ ID NO: 10477 - protein, 17 aa, Artificial Sequence
  Synthetically generated peptide
  VARIANT (1)..(17): Xaa = Any Amino Acid
ACXEFCANPXXAXCTGC

SEQ ID NO: 10478 - protein, 17 aa, Artificial Sequence
  Synthetically generated peptide
  VARIANT (1)..(17): Xaa = Any Amino Acid
ACXEFCANPXXACXTGC

SEQ ID NO: 10479 - protein, 17 aa, Artificial Sequence
  Synthetically generated peptide
  VARIANT (1)..(17): Xaa = Any Amino Acid
ACXEFCANPXXACTXGC

SEQ ID NO: 10480 - protein, 17 aa, Artificial Sequence
  Synthetically generated peptide
  VARIANT (1)..(17): Xaa = Any Amino Acid
ACXEFCANPXXACTGXC

SEQ ID NO: 10481 - protein, 16 aa, Artificial Sequence
  Synthetically generated peptide
  VARIANT (1)..(16): Xaa = Any Amino Acid
ACXEFCANPXAXCTGC

SEQ ID NO: 10482 - protein, 17 aa, Artificial Sequence
  Synthetically generated peptide
  VARIANT (1)..(17): Xaa = Any Amino Acid
ACXEFCANPXAXXCTGC

SEQ ID NO: 10483 - protein, 17 aa, Artificial Sequence
  Synthetically generated peptide
  VARIANT (1)..(17): Xaa = Any Amino Acid
ACXEFCANPXAXCXTGC

SEQ ID NO: 10484 - protein, 17 aa, Artificial Sequence
  Synthetically generated peptide
  VARIANT (1)..(17): Xaa = Any Amino Acid
ACXEFCANPXAXCTXGC

SEQ ID NO: 10485 - protein, 17 aa, Artificial Sequence
  Synthetically generated peptide
  VARIANT (1)..(17): Xaa = Any Amino Acid
ACXEFCANPXAXCTGXC

SEQ ID NO: 10486 - protein, 16 aa, Artificial Sequence
  Synthetically generated peptide
  VARIANT (1)..(16): Xaa = Any Amino Acid
ACXEFCANPXACXTGC

SEQ ID NO: 10487 - protein, 17 aa, Artificial Sequence
  Synthetically generated peptide
  VARIANT (1)..(17): Xaa = Any Amino Acid
ACXEFCANPXACXXTGC

SEQ ID NO: 10488 - protein, 17 aa, Artificial Sequence
  Synthetically generated peptide
  VARIANT (1)..(17): Xaa = Any Amino Acid
ACXEFCANPXACXTXGC

SEQ ID NO: 10489 - protein, 17 aa, Artificial Sequence
  Synthetically generated peptide
  VARIANT (1)..(17): Xaa = Any Amino Acid
ACXEFCANPXACXTGXC

SEQ ID NO: 10490 - protein, 16 aa, Artificial Sequence
  Synthetically generated peptide
  VARIANT (1)..(16): Xaa = Any Amino Acid
ACXEFCANPXACTXGC

SEQ ID NO: 10491 - protein, 17 aa, Artificial Sequence
  Synthetically generated peptide
  VARIANT (1)..(17): Xaa = Any Amino Acid
ACXEFCANPXACTXXGC

SEQ ID NO: 10492 - protein, 17 aa, Artificial Sequence
  Synthetically generated peptide
  VARIANT (1)..(17): Xaa = Any Amino Acid
ACXEFCANPXACTXGXC

SEQ ID NO: 10493 - protein, 16 aa, Artificial Sequence
  Synthetically generated peptide
  VARIANT (1)..(16): Xaa = Any Amino Acid
ACXEFCANPXACTGXC

SEQ ID NO: 10494 - protein, 17 aa, Artificial Sequence
  Synthetically generated peptide
  VARIANT (1)..(17): Xaa = Any Amino Acid
ACXEFCANPXACTGXXC

SEQ ID NO: 10495 - protein, 15 aa, Artificial Sequence
  Synthetically generated peptide
  VARIANT (1)..(15): Xaa = Any Amino Acid
ACXEFCANPAXCTGC

SEQ ID NO: 10496 - protein, 16 aa, Artificial Sequence
  Synthetically generated peptide
  VARIANT (1)..(16): Xaa = Any Amino Acid
ACXEFCANPAXXCTGC

SEQ ID NO: 10497 - protein, 17 aa, Artificial Sequence
  Synthetically generated peptide
  VARIANT (1)..(17): Xaa = Any Amino Acid
ACXEFCANPAXXXCTGC

SEQ ID NO: 10498 - protein, 17 aa, Artificial Sequence
  Synthetically generated peptide
  VARIANT (1)..(17): Xaa = Any Amino Acid
ACXEFCANPAXXCXTGC

SEQ ID NO: 10499 - protein, 17 aa, Artificial Sequence
  Synthetically generated peptide
  VARIANT (1)..(17): Xaa = Any Amino Acid
ACXEFCANPAXXCTXGC

SEQ ID NO: 10500 - protein, 17 aa, Artificial Sequence
  Synthetically generated peptide
  VARIANT (1)..(17): Xaa = Any Amino Acid
ACXEFCANPAXXCTGXC

SEQ ID NO: 10501 - protein, 16 aa, Artificial Sequence
  Synthetically generated peptide
  VARIANT (1)..(16): Xaa = Any Amino Acid
ACXEFCANPAXCXTGC

SEQ ID NO: 10502 - protein, 17 aa, Artificial Sequence
  Synthetically generated peptide
  VARIANT (1)..(17): Xaa = Any Amino Acid
ACXEFCANPAXCXXTGC

SEQ ID NO: 10503 - protein, 17 aa, Artificial Sequence
  Synthetically generated peptide
  VARIANT (1)..(17): Xaa = Any Amino Acid
ACXEFCANPAXCXTXGC

SEQ ID NO: 10504 - protein, 17 aa, Artificial Sequence
  Synthetically generated peptide
  VARIANT (1)..(17): Xaa = Any Amino Acid
ACXEFCANPAXCXTGXC

SEQ ID NO: 10505 - protein, 16 aa, Artificial Sequence
  Synthetically generated peptide
  VARIANT (1)..(16): Xaa = Any Amino Acid
ACXEFCANPAXCTXGC

SEQ ID NO: 10506 - protein, 17 aa, Artificial Sequence
  Synthetically generated peptide
  VARIANT (1)..(17): Xaa = Any Amino Acid
ACXEFCANPAXCTXXGC

SEQ ID NO: 10507 - protein, 17 aa, Artificial Sequence
  Synthetically generated peptide
  VARIANT (1)..(17): Xaa = Any Amino Acid
ACXEFCANPAXCTXGXC

SEQ ID NO: 10508 - protein, 16 aa, Artificial Sequence
  Synthetically generated peptide
  VARIANT (1)..(16): Xaa = Any Amino Acid
ACXEFCANPAXCTGXC

SEQ ID NO: 10509 - protein, 17 aa, Artificial Sequence
  Synthetically generated peptide
  VARIANT (1)..(17): Xaa = Any Amino Acid
ACXEFCANPAXCTGXXC

SEQ ID NO: 10510 - protein, 15 aa, Artificial Sequence
  Synthetically generated peptide
  VARIANT (1)..(15): Xaa = Any Amino Acid
ACXEFCANPACXTGC

SEQ ID NO: 10511 - protein, 16 aa, Artificial Sequence
  Synthetically generated peptide
  VARIANT (1)..(16): Xaa = Any Amino Acid
ACXEFCANPACXXTGC

SEQ ID NO: 10512 - protein, 17 aa, Artificial Sequence
  Synthetically generated peptide
  VARIANT (1)..(17): Xaa = Any Amino Acid
ACXEFCANPACXXXTGC

SEQ ID NO: 10513 - protein, 17 aa, Artificial Sequence
  Synthetically generated peptide
  VARIANT (1)..(17): Xaa = Any Amino Acid
ACXEFCANPACXXTXGC

SEQ ID NO: 10514 - protein, 17 aa, Artificial Sequence
  Synthetically generated peptide
  VARIANT (1)..(17): Xaa = Any Amino Acid
ACXEFCANPACXXTGXC

SEQ ID NO: 10515 - protein, 16 aa, Artificial Sequence
  Synthetically generated peptide
  VARIANT (1)..(16): Xaa = Any Amino Acid
ACXEFCANPACXTXGC

SEQ ID NO: 10516 - protein, 17 aa, Artificial Sequence
  Synthetically generated peptide
  VARIANT (1)..(17): Xaa = Any Amino Acid
ACXEFCANPACXTXXGC

SEQ ID NO: 10517 - protein, 17 aa, Artificial Sequence
  Synthetically generated peptide
  VARIANT (1)..(17): Xaa = Any Amino Acid
ACXEFCANPACXTXGXC

SEQ ID NO: 10518 - protein, 16 aa, Artificial Sequence
  Synthetically generated peptide
  VARIANT (1)..(16): Xaa = Any Amino Acid
ACXEFCANPACXTGXC

SEQ ID NO: 10519 - protein, 17 aa, Artificial Sequence
  Synthetically generated peptide
  VARIANT (1)..(17): Xaa = Any Amino Acid
ACXEFCANPACXTGXXC

SEQ ID NO: 10520 - protein, 15 aa, Artificial Sequence
  Synthetically generated peptide
  VARIANT (1)..(15): Xaa = Any Amino Acid
ACXEFCANPACTXGC

SEQ ID NO: 10521 - protein, 16 aa, Artificial Sequence
  Synthetically generated peptide
  VARIANT (1)..(16): Xaa = Any Amino Acid
ACXEFCANPACTXXGC

SEQ ID NO: 10522 - protein, 17 aa, Artificial Sequence
  Synthetically generated peptide
  VARIANT (1)..(17): Xaa = Any Amino Acid
ACXEFCANPACTXXXGC

SEQ ID NO: 10523 - protein, 17 aa, Artificial Sequence
  Synthetically generated peptide
  VARIANT (1)..(17): Xaa = Any Amino Acid
ACXEFCANPACTXXGXC

SEQ ID NO: 10524 - protein, 16 aa, Artificial Sequence
  Synthetically generated peptide
  VARIANT (1)..(16): Xaa = Any Amino Acid
ACXEFCANPACTXGXC

SEQ ID NO: 10525 - protein, 17 aa, Artificial Sequence
  Synthetically generated peptide
  VARIANT (1)..(17): Xaa = Any Amino Acid
ACXEFCANPACTXGXXC

SEQ ID NO: 10526 - protein, 15 aa, Artificial Sequence
  Synthetically generated peptide
  VARIANT (1)..(15): Xaa = Any Amino Acid
ACXEFCANPACTGXC

SEQ ID NO: 10527 - protein, 16 aa, Artificial Sequence
  Synthetically generated peptide
  VARIANT (1)..(16): Xaa = Any Amino Acid
ACXEFCANPACTGXXC

SEQ ID NO: 10528 - protein, 17 aa, Artificial Sequence
  Synthetically generated peptide
  VARIANT (1)..(17): Xaa = Any Amino Acid
ACXEFCANPACTGXXXC

SEQ ID NO: 10529 - protein, 14 aa, Artificial Sequence
  Synthetically generated peptide
  VARIANT (1)..(14): Xaa = Any Amino Acid
ACEXFCANPACTGC

SEQ ID NO: 10530 - protein, 15 aa, Artificial Sequence
  Synthetically generated peptide
  VARIANT (1)..(15): Xaa = Any Amino Acid
ACEXXFCANPACTGC

SEQ ID NO: 10531 - protein, 16 aa, Artificial Sequence
  Synthetically generated peptide
  VARIANT (1)..(16): Xaa = Any Amino Acid
ACEXXXFCANPACTGC

SEQ ID NO: 10532 - protein, 17 aa, Artificial Sequence
  Synthetically generated peptide
  VARIANT (1)..(17): Xaa = Any Amino Acid
ACEXXXXFCANPACTGC

SEQ ID NO: 10533 - protein, 17 aa, Artificial Sequence
  Synthetically generated peptide
  VARIANT (1)..(17): Xaa = Any Amino Acid
ACEXXXFXCANPACTGC

SEQ ID NO: 10534 - protein, 17 aa, Artificial Sequence
  Synthetically generated peptide
  VARIANT (1)..(17): Xaa = Any Amino Acid
ACEXXXFCAXNPACTGC

SEQ ID NO: 10535 - protein, 17 aa, Artificial Sequence
  Synthetically generated peptide
  VARIANT (1)..(17): Xaa = Any Amino Acid
ACEXXXFCANXPACTGC

SEQ ID NO: 10536 - protein, 17 aa, Artificial Sequence
  Synthetically generated peptide
  VARIANT (1)..(17): Xaa = Any Amino Acid
ACEXXXFCANPXACTGC

SEQ ID NO: 10537 - protein, 17 aa, Artificial Sequence
  Synthetically generated peptide
  VARIANT (1)..(17): Xaa = Any Amino Acid
ACEXXXFCANPAXCTGC

SEQ ID NO: 10538 - protein, 17 aa, Artificial Sequence
  Synthetically generated peptide
  VARIANT (1)..(17): Xaa = Any Amino Acid
ACEXXXFCANPACXTGC

SEQ ID NO: 10539 - protein, 17 aa, Artificial Sequence
  Synthetically generated peptide
  VARIANT (1)..(17): Xaa = Any Amino Acid
ACEXXXFCANPACTXGC

SEQ ID NO: 10540 - protein, 17 aa, Artificial Sequence
  Synthetically generated peptide
  VARIANT (1)..(17): Xaa = Any Amino Acid
ACEXXXFCANPACTGXC

SEQ ID NO: 10541 - protein, 16 aa, Artificial Sequence
  Synthetically generated peptide
  VARIANT (1)..(16): Xaa = Any Amino Acid
ACEXXFXCANPACTGC

SEQ ID NO: 10542 - protein, 17 aa, Artificial Sequence
  Synthetically generated peptide
  VARIANT (1)..(17): Xaa = Any Amino Acid
ACEXXFXXCANPACTGC

SEQ ID NO: 10543 - protein, 17 aa, Artificial Sequence
  Synthetically generated peptide
  VARIANT (1)..(17): Xaa = Any Amino Acid
ACEXXFXCAXNPACTGC

SEQ ID NO: 10544 - protein, 17 aa, Artificial Sequence
  Synthetically generated peptide
  VARIANT (1)..(17): Xaa = Any Amino Acid
ACEXXFXCANXPACTGC

SEQ ID NO: 10545 - protein, 17 aa, Artificial Sequence
  Synthetically generated peptide
  VARIANT (1)..(17): Xaa = Any Amino Acid
ACEXXFXCANPXACTGC

SEQ ID NO: 10546 - protein, 17 aa, Artificial Sequence
  Synthetically generated peptide
  VARIANT (1)..(17): Xaa = Any Amino Acid
ACEXXFXCANPAXCTGC

SEQ ID NO: 10547 - protein, 17 aa, Artificial Sequence
  Synthetically generated peptide
  VARIANT (1)..(17): Xaa = Any Amino Acid
ACEXXFXCANPACXTGC

SEQ ID NO: 10548 - protein, 17 aa, Artificial Sequence
  Synthetically generated peptide
  VARIANT (1)..(17): Xaa = Any Amino Acid
ACEXXFXCANPACTXGC

SEQ ID NO: 10549 - protein, 17 aa, Artificial Sequence
  Synthetically generated peptide
  VARIANT (1)..(17): Xaa = Any Amino Acid
ACEXXFXCANPACTGXC

SEQ ID NO: 10550 - protein, 16 aa, Artificial Sequence
  Synthetically generated peptide
  VARIANT (1)..(16): Xaa = Any Amino Acid
ACEXXFCAXNPACTGC

SEQ ID NO: 10551 - protein, 17 aa, Artificial Sequence
  Synthetically generated peptide
  VARIANT (1)..(17): Xaa = Any Amino Acid
ACEXXFCAXXNPACTGC

SEQ ID NO: 10552 - protein, 17 aa, Artificial Sequence
  Synthetically generated peptide
  VARIANT (1)..(17): Xaa = Any Amino Acid
ACEXXFCAXNXPACTGC

SEQ ID NO: 10553 - protein, 17 aa, Artificial Sequence
  Synthetically generated peptide
  VARIANT (1)..(17): Xaa = Any Amino Acid
ACEXXFCAXNPXACTGC

SEQ ID NO: 10554 - protein, 17 aa, Artificial Sequence
  Synthetically generated peptide
  VARIANT (1)..(17): Xaa = Any Amino Acid
ACEXXFCAXNPAXCTGC

SEQ ID NO: 10555 - protein, 17 aa, Artificial Sequence
  Synthetically generated peptide
  VARIANT (1)..(17): Xaa = Any Amino Acid
ACEXXFCAXNPACXTGC

SEQ ID NO: 10556 - protein, 17 aa, Artificial Sequence
  Synthetically generated peptide
  VARIANT (1)..(17): Xaa = Any Amino Acid
ACEXXFCAXNPACTXGC

SEQ ID NO: 10557 - protein, 17 aa, Artificial Sequence
  Synthetically generated peptide
  VARIANT (1)..(17): Xaa = Any Amino Acid
ACEXXFCAXNPACTGXC

SEQ ID NO: 10558 - protein, 16 aa, Artificial Sequence
  Synthetically generated peptide
  VARIANT (1)..(16): Xaa = Any Amino Acid
ACEXXFCANXPACTGC

SEQ ID NO: 10559 - protein, 17 aa, Artificial Sequence
  Synthetically generated peptide
  VARIANT (1)..(17): Xaa = Any Amino Acid
ACEXXFCANXXPACTGC

SEQ ID NO: 10560 - protein, 17 aa, Artificial Sequence
  Synthetically generated peptide
  VARIANT (1)..(17): Xaa = Any Amino Acid
ACEXXFCANXPXACTGC

SEQ ID NO: 10561 - protein, 17 aa, Artificial Sequence
  Synthetically generated peptide
  VARIANT (1)..(17): Xaa = Any Amino Acid
ACEXXFCANXPAXCTGC

SEQ ID NO: 10562 - protein, 17 aa, Artificial Sequence
  Synthetically generated peptide
  VARIANT (1)..(17): Xaa = Any Amino Acid
ACEXXFCANXPACXTGC

SEQ ID NO: 10563 - protein, 17 aa, Artificial Sequence
  Synthetically generated peptide
  VARIANT (1)..(17): Xaa = Any Amino Acid
ACEXXFCANXPACTXGC

SEQ ID NO: 10564 - protein, 17 aa, Artificial Sequence
  Synthetically generated peptide
  VARIANT (1)..(17): Xaa = Any Amino Acid
ACEXXFCANXPACTGXC

SEQ ID NO: 10565 - protein, 16 aa, Artificial Sequence
  Synthetically generated peptide
  VARIANT (1)..(16): Xaa = Any Amino Acid
ACEXXFCANPXACTGC

SEQ ID NO: 10566 - protein, 17 aa, Artificial Sequence
  Synthetically generated peptide
  VARIANT (1)..(17): Xaa = Any Amino Acid
ACEXXFCANPXXACTGC

SEQ ID NO: 10567 - protein, 17 aa, Artificial Sequence
  Synthetically generated peptide
  VARIANT (1)..(17): Xaa = Any Amino Acid
ACEXXFCANPXAXCTGC

SEQ ID NO: 10568 - protein, 17 aa, Artificial Sequence
  Synthetically generated peptide
  VARIANT (1)..(17): Xaa = Any Amino Acid
ACEXXFCANPXACXTGC

SEQ ID NO: 10569 - protein, 17 aa, Artificial Sequence
  Synthetically generated peptide
  VARIANT (1)..(17): Xaa = Any Amino Acid
ACEXXFCANPXACTXGC

SEQ ID NO: 10570 - protein, 17 aa, Artificial Sequence
  Synthetically generated peptide
  VARIANT (1)..(17): Xaa = Any Amino Acid
ACEXXFCANPXACTGXC

SEQ ID NO: 10571 - protein, 16 aa, Artificial Sequence
  Synthetically generated peptide
  VARIANT (1)..(16): Xaa = Any Amino Acid
ACEXXFCANPAXCTGC

SEQ ID NO: 10572 - protein, 17 aa, Artificial Sequence
  Synthetically generated peptide
  VARIANT (1)..(17): Xaa = Any Amino Acid
ACEXXFCANPAXXCTGC

SEQ ID NO: 10573 - protein, 17 aa, Artificial Sequence
  Synthetically generated peptide
  VARIANT (1)..(17): Xaa = Any Amino Acid
ACEXXFCANPAXCXTGC

SEQ ID NO: 10574 - protein, 17 aa, Artificial Sequence
  Synthetically generated peptide
  VARIANT (1)..(17): Xaa = Any Amino Acid
ACEXXFCANPAXCTXGC

SEQ ID NO: 10575 - protein, 17 aa, Artificial Sequence
  Synthetically generated peptide
  VARIANT (1)..(17): Xaa = Any Amino Acid
ACEXXFCANPAXCTGXC

SEQ ID NO: 10576 - protein, 16 aa, Artificial Sequence
  Synthetically generated peptide
  VARIANT (1)..(16): Xaa = Any Amino Acid
ACEXXFCANPACXTGC

SEQ ID NO: 10577 - protein, 17 aa, Artificial Sequence
  Synthetically generated peptide
  VARIANT (1)..(17): Xaa = Any Amino Acid
ACEXXFCANPACXXTGC

SEQ ID NO: 10578 - protein, 17 aa, Artificial Sequence
  Synthetically generated peptide
  VARIANT (1)..(17): Xaa = Any Amino Acid
ACEXXFCANPACXTXGC

SEQ ID NO: 10579 - protein, 17 aa, Artificial Sequence
  Synthetically generated peptide
  VARIANT (1)..(17): Xaa = Any Amino Acid
ACEXXFCANPACXTGXC

SEQ ID NO: 10580 - protein, 16 aa, Artificial Sequence
  Synthetically generated peptide
  VARIANT (1)..(16): Xaa = Any Amino Acid
ACEXXFCANPACTXGC

SEQ ID NO: 10581 - protein, 17 aa, Artificial Sequence
  Synthetically generated peptide
  VARIANT (1)..(17): Xaa = Any Amino Acid
ACEXXFCANPACTXXGC

SEQ ID NO: 10582 - protein, 17 aa, Artificial Sequence
  Synthetically generated peptide
  VARIANT (1)..(17): Xaa = Any Amino Acid
ACEXXFCANPACTXGXC

SEQ ID NO: 10583 - protein, 16 aa, Artificial Sequence
  Synthetically generated peptide
  VARIANT (1)..(16): Xaa = Any Amino Acid
ACEXXFCANPACTGXC

SEQ ID NO: 10584 - protein, 17 aa, Artificial Sequence
  Synthetically generated peptide
  VARIANT (1)..(17): Xaa = Any Amino Acid
ACEXXFCANPACTGXXC

SEQ ID NO: 10585 - protein, 15 aa, Artificial Sequence
  Synthetically generated peptide
  VARIANT (1)..(15): Xaa = Any Amino Acid
ACEXFXCANPACTGC

SEQ ID NO: 10586 - protein, 16 aa, Artificial Sequence
  Synthetically generated peptide
  VARIANT (1)..(16): Xaa = Any Amino Acid
ACEXFXXCANPACTGC

SEQ ID NO: 10587 - protein, 17 aa, Artificial Sequence
  Synthetically generated peptide
  VARIANT (1)..(17): Xaa = Any Amino Acid
ACEXFXXXCANPACTGC

SEQ ID NO: 10588 - protein, 17 aa, Artificial Sequence
  Synthetically generated peptide
  VARIANT (1)..(17): Xaa = Any Amino Acid
ACEXFXXCAXNPACTGC

SEQ ID NO: 10589 - protein, 17 aa, Artificial Sequence
  Synthetically generated peptide
  VARIANT (1)..(17): Xaa = Any Amino Acid
ACEXFXXCANXPACTGC

SEQ ID NO: 10590 - protein, 17 aa, Artificial Sequence
  Synthetically generated peptide
  VARIANT (1)..(17): Xaa = Any Amino Acid
ACEXFXXCANPXACTGC

SEQ ID NO: 10591 - protein, 17 aa, Artificial Sequence
  Synthetically generated peptide
  VARIANT (1)..(17): Xaa = Any Amino Acid
ACEXFXXCANPAXCTGC

SEQ ID NO: 10592 - protein, 17 aa, Artificial Sequence
  Synthetically generated peptide
  VARIANT (1)..(17): Xaa = Any Amino Acid
ACEXFXXCANPACXTGC

SEQ ID NO: 10593 - protein, 17 aa, Artificial Sequence
  Synthetically generated peptide
  VARIANT (1)..(17): Xaa = Any Amino Acid
ACEXFXXCANPACTXGC

SEQ ID NO: 10594 - protein, 17 aa, Artificial Sequence
  Synthetically generated peptide
  VARIANT (1)..(17): Xaa = Any Amino Acid
ACEXFXXCANPACTGXC

SEQ ID NO: 10595 - protein, 16 aa, Artificial Sequence
  Synthetically generated peptide
  VARIANT (1)..(16): Xaa = Any Amino Acid
ACEXFXCAXNPACTGC

SEQ ID NO: 10596 - protein, 17 aa, Artificial Sequence
  Synthetically generated peptide
  VARIANT (1)..(17): Xaa = Any Amino Acid
ACEXFXCAXXNPACTGC

SEQ ID NO: 10597 - protein, 17 aa, Artificial Sequence
  Synthetically generated peptide
  VARIANT (1)..(17): Xaa = Any Amino Acid
ACEXFXCAXNXPACTGC

SEQ ID NO: 10598 - protein, 17 aa, Artificial Sequence
  Synthetically generated peptide
  VARIANT (1)..(17): Xaa = Any Amino Acid
ACEXFXCAXNPXACTGC

SEQ ID NO: 10599 - protein, 17 aa, Artificial Sequence
  Synthetically generated peptide
  VARIANT (1)..(17): Xaa = Any Amino Acid
ACEXFXCAXNPAXCTGC

SEQ ID NO: 10600 - protein, 17 aa, Artificial Sequence
  Synthetically generated peptide
  VARIANT (1)..(17): Xaa = Any Amino Acid
ACEXFXCAXNPACXTGC

SEQ ID NO: 10601 - protein, 17 aa, Artificial Sequence
  Synthetically generated peptide
  VARIANT (1)..(17): Xaa = Any Amino Acid
ACEXFXCAXNPACTXGC

SEQ ID NO: 10602 - protein, 17 aa, Artificial Sequence
  Synthetically generated peptide
  VARIANT (1)..(17): Xaa = Any Amino Acid
ACEXFXCAXNPACTGXC

SEQ ID NO: 10603 - protein, 16 aa, Artificial Sequence
  Synthetically generated peptide
  VARIANT (1)..(16): Xaa = Any Amino Acid
ACEXFXCANXPACTGC

SEQ ID NO: 10604 - protein, 17 aa, Artificial Sequence
  Synthetically generated peptide
  VARIANT (1)..(17): Xaa = Any Amino Acid
ACEXFXCANXXPACTGC

SEQ ID NO: 10605 - protein, 17 aa, Artificial Sequence
  Synthetically generated peptide
  VARIANT (1)..(17): Xaa = Any Amino Acid
ACEXFXCANXPXACTGC

SEQ ID NO: 10606 - protein, 17 aa, Artificial Sequence
  Synthetically generated peptide
  VARIANT (1)..(17): Xaa = Any Amino Acid
ACEXFXCANXPAXCTGC

SEQ ID NO: 10607 - protein, 17 aa, Artificial Sequence
  Synthetically generated peptide
  VARIANT (1)..(17): Xaa = Any Amino Acid
ACEXFXCANXPACXTGC

SEQ ID NO: 10608 - protein, 17 aa, Artificial Sequence
  Synthetically generated peptide
  VARIANT (1)..(17): Xaa = Any Amino Acid
ACEXFXCANXPACTXGC

SEQ ID NO: 10609 - protein, 17 aa, Artificial Sequence
  Synthetically generated peptide
  VARIANT (1)..(17): Xaa = Any Amino Acid
ACEXFXCANXPACTGXC

SEQ ID NO: 10610 - protein, 16 aa, Artificial Sequence
  Synthetically generated peptide
  VARIANT (1)..(16): Xaa = Any Amino Acid
ACEXFXCANPXACTGC

SEQ ID NO: 10611 - protein, 17 aa, Artificial Sequence
  Synthetically generated peptide
  VARIANT (1)..(17): Xaa = Any Amino Acid
ACEXFXCANPXXACTGC

SEQ ID NO: 10612 - protein, 17 aa, Artificial Sequence
  Synthetically generated peptide
  VARIANT (1)..(17): Xaa = Any Amino Acid
ACEXFXCANPXAXCTGC

SEQ ID NO: 10613 - protein, 17 aa, Artificial Sequence
  Synthetically generated peptide
  VARIANT (1)..(17): Xaa = Any Amino Acid
ACEXFXCANPXACXTGC

SEQ ID NO: 10614 - protein, 17 aa, Artificial Sequence
  Synthetically generated peptide
  VARIANT (1)..(17): Xaa = Any Amino Acid
ACEXFXCANPXACTXGC

SEQ ID NO: 10615 - protein, 17 aa, Artificial Sequence
  Synthetically generated peptide
  VARIANT (1)..(17): Xaa = Any Amino Acid
ACEXFXCANPXACTGXC

SEQ ID NO: 10616 - protein, 16 aa, Artificial Sequence
  Synthetically generated peptide
  VARIANT (1)..(16): Xaa = Any Amino Acid
ACEXFXCANPAXCTGC

SEQ ID NO: 10617 - protein, 17 aa, Artificial Sequence
  Synthetically generated peptide
  VARIANT (1)..(17): Xaa = Any Amino Acid
ACEXFXCANPAXXCTGC

SEQ ID NO: 10618 - protein, 17 aa, Artificial Sequence
  Synthetically generated peptide
  VARIANT (1)..(17): Xaa = Any Amino Acid
ACEXFXCANPAXCXTGC

SEQ ID NO: 10619 - protein, 17 aa, Artificial Sequence
  Synthetically generated peptide
  VARIANT (1)..(17): Xaa = Any Amino Acid
ACEXFXCANPAXCTXGC

SEQ ID NO: 10620 - protein, 17 aa, Artificial Sequence
  Synthetically generated peptide
  VARIANT (1)..(17): Xaa = Any Amino Acid
ACEXFXCANPAXCTGXC

SEQ ID NO: 10621 - protein, 16 aa, Artificial Sequence
  Synthetically generated peptide
  VARIANT (1)..(16): Xaa = Any Amino Acid
ACEXFXCANPACXTGC

SEQ ID NO: 10622 - protein, 17 aa, Artificial Sequence
  Synthetically generated peptide
  VARIANT (1)..(17): Xaa = Any Amino Acid
ACEXFXCANPACXXTGC

SEQ ID NO: 10623 - protein, 17 aa, Artificial Sequence
  Synthetically generated peptide
  VARIANT (1)..(17): Xaa = Any Amino Acid
ACEXFXCANPACXTXGC

SEQ ID NO: 10624 - protein, 17 aa, Artificial Sequence
  Synthetically generated peptide
  VARIANT (1)..(17): Xaa = Any Amino Acid
ACEXFXCANPACXTGXC

SEQ ID NO: 10625 - protein, 16 aa, Artificial Sequence
  Synthetically generated peptide
  VARIANT (1)..(16): Xaa = Any Amino Acid
ACEXFXCANPACTXGC

SEQ ID NO: 10626 - protein, 17 aa, Artificial Sequence
  Synthetically generated peptide
  VARIANT (1)..(17): Xaa = Any Amino Acid
ACEXFXCANPACTXXGC

SEQ ID NO: 10627 - protein, 17 aa, Artificial Sequence
  Synthetically generated peptide
  VARIANT (1)..(17): Xaa = Any Amino Acid
ACEXFXCANPACTXGXC

SEQ ID NO: 10628 - protein, 16 aa, Artificial Sequence
  Synthetically generated peptide
  VARIANT (1)..(16): Xaa = Any Amino Acid
ACEXFXCANPACTGXC

SEQ ID NO: 10629 - protein, 17 aa, Artificial Sequence
  Synthetically generated peptide
  VARIANT (1)..(17): Xaa = Any Amino Acid
ACEXFXCANPACTGXXC

SEQ ID NO: 10630 - protein, 15 aa, Artificial Sequence
  Synthetically generated peptide
  VARIANT (1)..(15): Xaa = Any Amino Acid
ACEXFCAXNPACTGC

SEQ ID NO: 10631 - protein, 16 aa, Artificial Sequence
  Synthetically generated peptide
  VARIANT (1)..(16): Xaa = Any Amino Acid
ACEXFCAXXNPACTGC

SEQ ID NO: 10632 - protein, 17 aa, Artificial Sequence
  Synthetically generated peptide
  VARIANT (1)..(17): Xaa = Any Amino Acid
ACEXFCAXXXNPACTGC

SEQ ID NO: 10633 - protein, 17 aa, Artificial Sequence
  Synthetically generated peptide
  VARIANT (1)..(17): Xaa = Any Amino Acid
ACEXFCAXXNXPACTGC

SEQ ID NO: 10634 - protein, 17 aa, Artificial Sequence
  Synthetically generated peptide
  VARIANT (1)..(17): Xaa = Any Amino Acid
ACEXFCAXXNPXACTGC

SEQ ID NO: 10635 - protein, 17 aa, Artificial Sequence
  Synthetically generated peptide
  VARIANT (1)..(17): Xaa = Any Amino Acid
ACEXFCAXXNPAXCTGC

SEQ ID NO: 10636 - protein, 17 aa, Artificial Sequence
  Synthetically generated peptide
  VARIANT (1)..(17): Xaa = Any Amino Acid
ACEXFCAXXNPACXTGC

SEQ ID NO: 10637 - protein, 17 aa, Artificial Sequence
  Synthetically generated peptide
  VARIANT (1)..(17): Xaa = Any Amino Acid
ACEXFCAXXNPACTXGC

SEQ ID NO: 10638 - protein, 17 aa, Artificial Sequence
  Synthetically generated peptide
  VARIANT (1)..(17): Xaa = Any Amino Acid
ACEXFCAXXNPACTGXC

SEQ ID NO: 10639 - protein, 16 aa, Artificial Sequence
  Synthetically generated peptide
  VARIANT (1)..(16): Xaa = Any Amino Acid
ACEXFCAXNXPACTGC

SEQ ID NO: 10640 - protein, 17 aa, Artificial Sequence
  Synthetically generated peptide
  VARIANT (1)..(17): Xaa = Any Amino Acid
ACEXFCAXNXXPACTGC

SEQ ID NO: 10641 - protein, 17 aa, Artificial Sequence
  Synthetically generated peptide
  VARIANT (1)..(17): Xaa = Any Amino Acid
ACEXFCAXNXPXACTGC

SEQ ID NO: 10642 - protein, 17 aa, Artificial Sequence
  Synthetically generated peptide
  VARIANT (1)..(17): Xaa = Any Amino Acid
ACEXFCAXNXPAXCTGC

SEQ ID NO: 10643 - protein, 17 aa, Artificial Sequence
  Synthetically generated peptide
  VARIANT (1)..(17): Xaa = Any Amino Acid
ACEXFCAXNXPACXTGC

SEQ ID NO: 10644 - protein, 17 aa, Artificial Sequence
  Synthetically generated peptide
  VARIANT (1)..(17): Xaa = Any Amino Acid
ACEXFCAXNXPACTXGC

SEQ ID NO: 10645 - protein, 17 aa, Artificial Sequence
  Synthetically generated peptide
  VARIANT (1)..(17): Xaa = Any Amino Acid
ACEXFCAXNXPACTGXC

SEQ ID NO: 10646 - protein, 16 aa, Artificial Sequence
  Synthetically generated peptide
  VARIANT (1)..(16): Xaa = Any Amino Acid
ACEXFCAXNPXACTGC

SEQ ID NO: 10647 - protein, 17 aa, Artificial Sequence
  Synthetically generated peptide
  VARIANT (1)..(17): Xaa = Any Amino Acid
ACEXFCAXNPXXACTGC

SEQ ID NO: 10648 - protein, 17 aa, Artificial Sequence
  Synthetically generated peptide
  VARIANT (1)..(17): Xaa = Any Amino Acid
ACEXFCAXNPXAXCTGC

SEQ ID NO: 10649 - protein, 17 aa, Artificial Sequence
  Synthetically generated peptide
  VARIANT (1)..(17): Xaa = Any Amino Acid
ACEXFCAXNPXACXTGC

SEQ ID NO: 10650 - protein, 17 aa, Artificial Sequence
  Synthetically generated peptide
  VARIANT (1)..(17): Xaa = Any Amino Acid
ACEXFCAXNPXACTXGC

SEQ ID NO: 10651 - protein, 17 aa, Artificial Sequence
  Synthetically generated peptide
  VARIANT (1)..(17): Xaa = Any Amino Acid
ACEXFCAXNPXACTGXC

SEQ ID NO: 10652 - protein, 16 aa, Artificial Sequence
  Synthetically generated peptide
  VARIANT (1)..(16): Xaa = Any Amino Acid
ACEXFCAXNPAXCTGC

SEQ ID NO: 10653 - protein, 17 aa, Artificial Sequence
  Synthetically generated peptide
  VARIANT (1)..(17): Xaa = Any Amino Acid
ACEXFCAXNPAXXCTGC

SEQ ID NO: 10654 - protein, 17 aa, Artificial Sequence
  Synthetically generated peptide
  VARIANT (1)..(17): Xaa = Any Amino Acid
ACEXFCAXNPAXCXTGC

SEQ ID NO: 10655 - protein, 17 aa, Artificial Sequence
  Synthetically generated peptide
  VARIANT (1)..(17): Xaa = Any Amino Acid
ACEXFCAXNPAXCTXGC

SEQ ID NO: 10656 - protein, 17 aa, Artificial Sequence
  Synthetically generated peptide
  VARIANT (1)..(17): Xaa = Any Amino Acid
ACEXFCAXNPAXCTGXC

SEQ ID NO: 10657 - protein, 16 aa, Artificial Sequence
  Synthetically generated peptide
  VARIANT (1)..(16): Xaa = Any Amino Acid
ACEXFCAXNPACXTGC

SEQ ID NO: 10658 - protein, 17 aa, Artificial Sequence
  Synthetically generated peptide
  VARIANT (1)..(17): Xaa = Any Amino Acid
ACEXFCAXNPACXXTGC

SEQ ID NO: 10659 - protein, 17 aa, Artificial Sequence
  Synthetically generated peptide
  VARIANT (1)..(17): Xaa = Any Amino Acid
ACEXFCAXNPACXTXGC

SEQ ID NO: 10660 - protein, 17 aa, Artificial Sequence
  Synthetically generated peptide
  VARIANT (1)..(17): Xaa = Any Amino Acid
ACEXFCAXNPACXTGXC

SEQ ID NO: 10661 - protein, 16 aa, Artificial Sequence
  Synthetically generated peptide
  VARIANT (1)..(16): Xaa = Any Amino Acid
ACEXFCAXNPACTXGC

SEQ ID NO: 10662 - protein, 17 aa, Artificial Sequence
  Synthetically generated peptide
  VARIANT (1)..(17): Xaa = Any Amino Acid
ACEXFCAXNPACTXXGC

SEQ ID NO: 10663 - protein, 17 aa, Artificial Sequence
  Synthetically generated peptide
  VARIANT (1)..(17): Xaa = Any Amino Acid
ACEXFCAXNPACTXGXC

SEQ ID NO: 10664 - protein, 16 aa, Artificial Sequence
  Synthetically generated peptide
  VARIANT (1)..(16): Xaa = Any Amino Acid
ACEXFCAXNPACTGXC

SEQ ID NO: 10665 - protein, 17 aa, Artificial Sequence
  Synthetically generated peptide
  VARIANT (1)..(17): Xaa = Any Amino Acid
ACEXFCAXNPACTGXXC

SEQ ID NO: 10666 - protein, 15 aa, Artificial Sequence
  Synthetically generated peptide
  VARIANT (1)..(15): Xaa = Any Amino Acid
ACEXFCANXPACTGC

SEQ ID NO: 10667 - protein, 16 aa, Artificial Sequence
  Synthetically generated peptide
  VARIANT (1)..(16): Xaa = Any Amino Acid
ACEXFCANXXPACTGC

SEQ ID NO: 10668 - protein, 17 aa, Artificial Sequence
  Synthetically generated peptide
  VARIANT (1)..(17): Xaa = Any Amino Acid
ACEXFCANXXXPACTGC

SEQ ID NO: 10669 - protein, 17 aa, Artificial Sequence
  Synthetically generated peptide
  VARIANT (1)..(17): Xaa = Any Amino Acid
ACEXFCANXXPXACTGC

SEQ ID NO: 10670 - protein, 17 aa, Artificial Sequence
  Synthetically generated peptide
  VARIANT (1)..(17): Xaa = Any Amino Acid
ACEXFCANXXPAXCTGC

SEQ ID NO: 10671 - protein, 17 aa, Artificial Sequence
  Synthetically generated peptide
  VARIANT (1)..(17): Xaa = Any Amino Acid
ACEXFCANXXPACXTGC

SEQ ID NO: 10672 - protein, 17 aa, Artificial Sequence
  Synthetically generated peptide
  VARIANT (1)..(17): Xaa = Any Amino Acid
ACEXFCANXXPACTXGC

SEQ ID NO: 10673 - protein, 17 aa, Artificial Sequence
  Synthetically generated peptide
  VARIANT (1)..(17): Xaa = Any Amino Acid
ACEXFCANXXPACTGXC

SEQ ID NO: 10674 - protein, 16 aa, Artificial Sequence
  Synthetically generated peptide
  VARIANT (1)..(16): Xaa = Any Amino Acid
ACEXFCANXPXACTGC

SEQ ID NO: 10675 - protein, 17 aa, Artificial Sequence
  Synthetically generated peptide
  VARIANT (1)..(17): Xaa = Any Amino Acid
ACEXFCANXPXXACTGC

SEQ ID NO: 10676 - protein, 17 aa, Artificial Sequence
  Synthetically generated peptide
  VARIANT (1)..(17): Xaa = Any Amino Acid
ACEXFCANXPXAXCTGC

SEQ ID NO: 10677 - protein, 17 aa, Artificial Sequence
  Synthetically generated peptide
  VARIANT (1)..(17): Xaa = Any Amino Acid
ACEXFCANXPXACXTGC

SEQ ID NO: 10678 - protein, 17 aa, Artificial Sequence
  Synthetically generated peptide
  VARIANT (1)..(17): Xaa = Any Amino Acid
ACEXFCANXPXACTXGC

SEQ ID NO: 10679 - protein, 17 aa, Artificial Sequence
  Synthetically generated peptide
  VARIANT (1)..(17): Xaa = Any Amino Acid
ACEXFCANXPXACTGXC

SEQ ID NO: 10680 - protein, 16 aa, Artificial Sequence
  Synthetically generated peptide
  VARIANT (1)..(16): Xaa = Any Amino Acid
ACEXFCANXPAXCTGC

SEQ ID NO: 10681 - protein, 17 aa, Artificial Sequence
  Synthetically generated peptide
  VARIANT (1)..(17): Xaa = Any Amino Acid
ACEXFCANXPAXXCTGC

SEQ ID NO: 10682 - protein, 17 aa, Artificial Sequence
  Synthetically generated peptide
  VARIANT (1)..(17): Xaa = Any Amino Acid
ACEXFCANXPAXCXTGC

SEQ ID NO: 10683 - protein, 17 aa, Artificial Sequence
  Synthetically generated peptide
  VARIANT (1)..(17): Xaa = Any Amino Acid
ACEXFCANXPAXCTXGC

SEQ ID NO: 10684 - protein, 17 aa, Artificial Sequence
  Synthetically generated peptide
  VARIANT (1)..(17): Xaa = Any Amino Acid
ACEXFCANXPAXCTGXC

SEQ ID NO: 10685 - protein, 16 aa, Artificial Sequence
  Synthetically generated peptide
  VARIANT (1)..(16): Xaa = Any Amino Acid
ACEXFCANXPACXTGC

SEQ ID NO: 10686 - protein, 17 aa, Artificial Sequence
  Synthetically generated peptide
  VARIANT (1)..(17): Xaa = Any Amino Acid
ACEXFCANXPACXXTGC

SEQ ID NO: 10687 - protein, 17 aa, Artificial Sequence
  Synthetically generated peptide
  VARIANT (1)..(17): Xaa = Any Amino Acid
ACEXFCANXPACXTXGC

SEQ ID NO: 10688 - protein, 17 aa, Artificial Sequence
  Synthetically generated peptide
  VARIANT (1)..(17): Xaa = Any Amino Acid
ACEXFCANXPACXTGXC

SEQ ID NO: 10689 - protein, 16 aa, Artificial Sequence
  Synthetically generated peptide
  VARIANT (1)..(16): Xaa = Any Amino Acid
ACEXFCANXPACTXGC

SEQ ID NO: 10690 - protein, 17 aa, Artificial Sequence
  Synthetically generated peptide
  VARIANT (1)..(17): Xaa = Any Amino Acid
ACEXFCANXPACTXXGC

SEQ ID NO: 10691 - protein, 17 aa, Artificial Sequence
  Synthetically generated peptide
  VARIANT (1)..(17): Xaa = Any Amino Acid
ACEXFCANXPACTXGXC

SEQ ID NO: 10692 - protein, 16 aa, Artificial Sequence
  Synthetically generated peptide
  VARIANT (1)..(16): Xaa = Any Amino Acid
ACEXFCANXPACTGXC

SEQ ID NO: 10693 - protein, 17 aa, Artificial Sequence
  Synthetically generated peptide
  VARIANT (1)..(17): Xaa = Any Amino Acid
ACEXFCANXPACTGXXC

SEQ ID NO: 10694 - protein, 15 aa, Artificial Sequence
  Synthetically generated peptide
  VARIANT (1)..(15): Xaa = Any Amino Acid
ACEXFCANPXACTGC

SEQ ID NO: 10695 - protein, 16 aa, Artificial Sequence
  Synthetically generated peptide
  VARIANT (1)..(16): Xaa = Any Amino Acid
ACEXFCANPXXACTGC

SEQ ID NO: 10696 - protein, 17 aa, Artificial Sequence
  Synthetically generated peptide
  VARIANT (1)..(17): Xaa = Any Amino Acid
ACEXFCANPXXXACTGC

SEQ ID NO: 10697 - protein, 17 aa, Artificial Sequence
  Synthetically generated peptide
  VARIANT (1)..(17): Xaa = Any Amino Acid
ACEXFCANPXXAXCTGC

SEQ ID NO: 10698 - protein, 17 aa, Artificial Sequence
  Synthetically generated peptide
  VARIANT (1)..(17): Xaa = Any Amino Acid
ACEXFCANPXXACXTGC

SEQ ID NO: 10699 - protein, 17 aa, Artificial Sequence
  Synthetically generated peptide
  VARIANT (1)..(17): Xaa = Any Amino Acid
ACEXFCANPXXACTXGC

SEQ ID NO: 10700 - protein, 17 aa, Artificial Sequence
  Synthetically generated peptide
  VARIANT (1)..(17): Xaa = Any Amino Acid
ACEXFCANPXXACTGXC

SEQ ID NO: 10701 - protein, 16 aa, Artificial Sequence
  Synthetically generated peptide
  VARIANT (1)..(16): Xaa = Any Amino Acid
ACEXFCANPXAXCTGC

SEQ ID NO: 10702 - protein, 17 aa, Artificial Sequence
  Synthetically generated peptide
  VARIANT (1)..(17): Xaa = Any Amino Acid
ACEXFCANPXAXXCTGC

SEQ ID NO: 10703 - protein, 17 aa, Artificial Sequence
  Synthetically generated peptide
  VARIANT (1)..(17): Xaa = Any Amino Acid
ACEXFCANPXAXCXTGC

SEQ ID NO: 10704 - protein, 17 aa, Artificial Sequence
  Synthetically generated peptide
  VARIANT (1)..(17): Xaa = Any Amino Acid
ACEXFCANPXAXCTXGC

SEQ ID NO: 10705 - protein, 17 aa, Artificial Sequence
  Synthetically generated peptide
  VARIANT (1)..(17): Xaa = Any Amino Acid
ACEXFCANPXAXCTGXC

SEQ ID NO: 10706 - protein, 16 aa, Artificial Sequence
  Synthetically generated peptide
  VARIANT (1)..(16): Xaa = Any Amino Acid
ACEXFCANPXACXTGC

SEQ ID NO: 10707 - protein, 17 aa, Artificial Sequence
  Synthetically generated peptide
  VARIANT (1)..(17): Xaa = Any Amino Acid
ACEXFCANPXACXXTGC

SEQ ID NO: 10708 - protein, 17 aa, Artificial Sequence
  Synthetically generated peptide
  VARIANT (1)..(17): Xaa = Any Amino Acid
ACEXFCANPXACXTXGC

SEQ ID NO: 10709 - protein, 17 aa, Artificial Sequence
  Synthetically generated peptide
  VARIANT (1)..(17): Xaa = Any Amino Acid
ACEXFCANPXACXTGXC

SEQ ID NO: 10710 - protein, 16 aa, Artificial Sequence
  Synthetically generated peptide
  VARIANT (1)..(16): Xaa = Any Amino Acid
ACEXFCANPXACTXGC

SEQ ID NO: 10711 - protein, 17 aa, Artificial Sequence
  Synthetically generated peptide
  VARIANT (1)..(17): Xaa = Any Amino Acid
ACEXFCANPXACTXXGC

SEQ ID NO: 10712 - protein, 17 aa, Artificial Sequence
  Synthetically generated peptide
  VARIANT (1)..(17): Xaa = Any Amino Acid
ACEXFCANPXACTXGXC

SEQ ID NO: 10713 - protein, 16 aa, Artificial Sequence
  Synthetically generated peptide
  VARIANT (1)..(16): Xaa = Any Amino Acid
ACEXFCANPXACTGXC

SEQ ID NO: 10714 - protein, 17 aa, Artificial Sequence
  Synthetically generated peptide
  VARIANT (1)..(17): Xaa = Any Amino Acid
ACEXFCANPXACTGXXC

SEQ ID NO: 10715 - protein, 15 aa, Artificial Sequence
  Synthetically generated peptide
  VARIANT (1)..(15): Xaa = Any Amino Acid
ACEXFCANPAXCTGC

SEQ ID NO: 10716 - protein, 16 aa, Artificial Sequence
  Synthetically generated peptide
  VARIANT (1)..(16): Xaa = Any Amino Acid
ACEXFCANPAXXCTGC

SEQ ID NO: 10717 - protein, 17 aa, Artificial Sequence
  Synthetically generated peptide
  VARIANT (1)..(17): Xaa = Any Amino Acid
ACEXFCANPAXXXCTGC

SEQ ID NO: 10718 - protein, 17 aa, Artificial Sequence
  Synthetically generated peptide
  VARIANT (1)..(17): Xaa = Any Amino Acid
ACEXFCANPAXXCXTGC

SEQ ID NO: 10719 - protein, 17 aa, Artificial Sequence
  Synthetically generated peptide
  VARIANT (1)..(17): Xaa = Any Amino Acid
ACEXFCANPAXXCTXGC

SEQ ID NO: 10720 - protein, 17 aa, Artificial Sequence
  Synthetically generated peptide
  VARIANT (1)..(17): Xaa = Any Amino Acid
ACEXFCANPAXXCTGXC

SEQ ID NO: 10721 - protein, 16 aa, Artificial Sequence
  Synthetically generated peptide
  VARIANT (1)..(16): Xaa = Any Amino Acid
ACEXFCANPAXCXTGC

SEQ ID NO: 10722 - protein, 17 aa, Artificial Sequence
  Synthetically generated peptide
  VARIANT (1)..(17): Xaa = Any Amino Acid
ACEXFCANPAXCXXTGC

SEQ ID NO: 10723 - protein, 17 aa, Artificial Sequence
  Synthetically generated peptide
  VARIANT (1)..(17): Xaa = Any Amino Acid
ACEXFCANPAXCXTXGC

SEQ ID NO: 10724 - protein, 17 aa, Artificial Sequence
  Synthetically generated peptide
  VARIANT (1)..(17): Xaa = Any Amino Acid
ACEXFCANPAXCXTGXC

SEQ ID NO: 10725 - protein, 16 aa, Artificial Sequence
  Synthetically generated peptide
  VARIANT (1)..(16): Xaa = Any Amino Acid
ACEXFCANPAXCTXGC

SEQ ID NO: 10726 - protein, 17 aa, Artificial Sequence
  Synthetically generated peptide
  VARIANT (1)..(17): Xaa = Any Amino Acid
ACEXFCANPAXCTXXGC

SEQ ID NO: 10727 - protein, 17 aa, Artificial Sequence
  Synthetically generated peptide
  VARIANT (1)..(17): Xaa = Any Amino Acid
ACEXFCANPAXCTXGXC

SEQ ID NO: 10728 - protein, 16 aa, Artificial Sequence
  Synthetically generated peptide
  VARIANT (1)..(16): Xaa = Any Amino Acid
ACEXFCANPAXCTGXC

SEQ ID NO: 10729 - protein, 17 aa, Artificial Sequence
  Synthetically generated peptide
  VARIANT (1)..(17): Xaa = Any Amino Acid
ACEXFCANPAXCTGXXC

SEQ ID NO: 10730 - protein, 15 aa, Artificial Sequence
  Synthetically generated peptide
  VARIANT (1)..(15): Xaa = Any Amino Acid
ACEXFCANPACXTGC

SEQ ID NO: 10731 - protein, 16 aa, Artificial Sequence
  Synthetically generated peptide
  VARIANT (1)..(16): Xaa = Any Amino Acid
ACEXFCANPACXXTGC

SEQ ID NO: 10732 - protein, 17 aa, Artificial Sequence
  Synthetically generated peptide
  VARIANT (1)..(17): Xaa = Any Amino Acid
ACEXFCANPACXXXTGC

SEQ ID NO: 10733 - protein, 17 aa, Artificial Sequence
  Synthetically generated peptide
  VARIANT (1)..(17): Xaa = Any Amino Acid
ACEXFCANPACXXTXGC

SEQ ID NO: 10734 - protein, 17 aa, Artificial Sequence
  Synthetically generated peptide
  VARIANT (1)..(17): Xaa = Any Amino Acid
ACEXFCANPACXXTGXC

SEQ ID NO: 10735 - protein, 16 aa, Artificial Sequence
  Synthetically generated peptide
  VARIANT (1)..(16): Xaa = Any Amino Acid
ACEXFCANPACXTXGC

SEQ ID NO: 10736 - protein, 17 aa, Artificial Sequence
  Synthetically generated peptide
  VARIANT (1)..(17): Xaa = Any Amino Acid
ACEXFCANPACXTXXGC

SEQ ID NO: 10737 - protein, 17 aa, Artificial Sequence
  Synthetically generated peptide
  VARIANT (1)..(17): Xaa = Any Amino Acid
ACEXFCANPACXTXGXC

SEQ ID NO: 10738 - protein, 16 aa, Artificial Sequence
  Synthetically generated peptide
  VARIANT (1)..(16): Xaa = Any Amino Acid
ACEXFCANPACXTGXC

SEQ ID NO: 10739 - protein, 17 aa, Artificial Sequence
  Synthetically generated peptide
  VARIANT (1)..(17): Xaa = Any Amino Acid
ACEXFCANPACXTGXXC

SEQ ID NO: 10740 - protein, 15 aa, Artificial Sequence
  Synthetically generated peptide
  VARIANT (1)..(15): Xaa = Any Amino Acid
ACEXFCANPACTXGC

SEQ ID NO: 10741 - protein, 16 aa, Artificial Sequence
  Synthetically generated peptide
  VARIANT (1)..(16): Xaa = Any Amino Acid
ACEXFCANPACTXXGC

SEQ ID NO: 10742 - protein, 17 aa, Artificial Sequence
  Synthetically generated peptide
  VARIANT (1)..(17): Xaa = Any Amino Acid
ACEXFCANPACTXXXGC

SEQ ID NO: 10743 - protein, 17 aa, Artificial Sequence
  Synthetically generated peptide
  VARIANT (1)..(17): Xaa = Any Amino Acid
ACEXFCANPACTXXGXC

SEQ ID NO: 10744 - protein, 16 aa, Artificial Sequence
  Synthetically generated peptide
  VARIANT (1)..(16): Xaa = Any Amino Acid
ACEXFCANPACTXGXC

SEQ ID NO: 10745 - protein, 17 aa, Artificial Sequence
  Synthetically generated peptide
  VARIANT (1)..(17): Xaa = Any Amino Acid
ACEXFCANPACTXGXXC

SEQ ID NO: 10746 - protein, 15 aa, Artificial Sequence
  Synthetically generated peptide
  VARIANT (1)..(15): Xaa = Any Amino Acid
ACEXFCANPACTGXC

SEQ ID NO: 10747 - protein, 16 aa, Artificial Sequence
  Synthetically generated peptide
  VARIANT (1)..(16): Xaa = Any Amino Acid
ACEXFCANPACTGXXC

SEQ ID NO: 10748 - protein, 17 aa, Artificial Sequence
  Synthetically generated peptide
  VARIANT (1)..(17): Xaa = Any Amino Acid
ACEXFCANPACTGXXXC

SEQ ID NO: 10749 - protein, 14 aa, Artificial Sequence
  Synthetically generated peptide
  VARIANT (1)..(14): Xaa = Any Amino Acid
ACEFXCANPACTGC

SEQ ID NO: 10750 - protein, 15 aa, Artificial Sequence
  Synthetically generated peptide
  VARIANT (1)..(15): Xaa = Any Amino Acid
ACEFXXCANPACTGC

SEQ ID NO: 10751 - protein, 16 aa, Artificial Sequence
  Synthetically generated peptide
  VARIANT (1)..(16): Xaa = Any Amino Acid
ACEFXXXCANPACTGC

SEQ ID NO: 10752 - protein, 17 aa, Artificial Sequence
  Synthetically generated peptide
  VARIANT (1)..(17): Xaa = Any Amino Acid
ACEFXXXXCANPACTGC

SEQ ID NO: 10753 - protein, 17 aa, Artificial Sequence
  Synthetically generated peptide
  VARIANT (1)..(17): Xaa = Any Amino Acid
ACEFXXXCAXNPACTGC

SEQ ID NO: 10754 - protein, 17 aa, Artificial Sequence
  Synthetically generated peptide
  VARIANT (1)..(17): Xaa = Any Amino Acid
ACEFXXXCANXPACTGC

SEQ ID NO: 10755 - protein, 17 aa, Artificial Sequence
  Synthetically generated peptide
  VARIANT (1)..(17): Xaa = Any Amino Acid
ACEFXXXCANPXACTGC

SEQ ID NO: 10756 - protein, 17 aa, Artificial Sequence
  Synthetically generated peptide
  VARIANT (1)..(17): Xaa = Any Amino Acid
ACEFXXXCANPAXCTGC

SEQ ID NO: 10757 - protein, 17 aa, Artificial Sequence
  Synthetically generated peptide
  VARIANT (1)..(17): Xaa = Any Amino Acid
ACEFXXXCANPACXTGC

SEQ ID NO: 10758 - protein, 17 aa, Artificial Sequence
  Synthetically generated peptide
  VARIANT (1)..(17): Xaa = Any Amino Acid
ACEFXXXCANPACTXGC

SEQ ID NO: 10759 - protein, 17 aa, Artificial Sequence
  Synthetically generated peptide
  VARIANT (1)..(17): Xaa = Any Amino Acid
ACEFXXXCANPACTGXC

SEQ ID NO: 10760 - protein, 16 aa, Artificial Sequence
  Synthetically generated peptide
  VARIANT (1)..(16): Xaa = Any Amino Acid
ACEFXXCAXNPACTGC

SEQ ID NO: 10761 - protein, 17 aa, Artificial Sequence
  Synthetically generated peptide
  VARIANT (1)..(17): Xaa = Any Amino Acid
ACEFXXCAXXNPACTGC

SEQ ID NO: 10762 - protein, 17 aa, Artificial Sequence
  Synthetically generated peptide
  VARIANT (1)..(17): Xaa = Any Amino Acid
ACEFXXCAXNXPACTGC

SEQ ID NO: 10763 - protein, 17 aa, Artificial Sequence
  Synthetically generated peptide
  VARIANT (1)..(17): Xaa = Any Amino Acid
ACEFXXCAXNPXACTGC

SEQ ID NO: 10764 - protein, 17 aa, Artificial Sequence
  Synthetically generated peptide
  VARIANT (1)..(17): Xaa = Any Amino Acid
ACEFXXCAXNPAXCTGC

SEQ ID NO: 10765 - protein, 17 aa, Artificial Sequence
  Synthetically generated peptide
  VARIANT (1)..(17): Xaa = Any Amino Acid
ACEFXXCAXNPACXTGC

SEQ ID NO: 10766 - protein, 17 aa, Artificial Sequence
  Synthetically generated peptide
  VARIANT (1)..(17): Xaa = Any Amino Acid
ACEFXXCAXNPACTXGC

SEQ ID NO: 10767 - protein, 17 aa, Artificial Sequence
  Synthetically generated peptide
  VARIANT (1)..(17): Xaa = Any Amino Acid
ACEFXXCAXNPACTGXC

SEQ ID NO: 10768 - protein, 16 aa, Artificial Sequence
  Synthetically generated peptide
  VARIANT (1)..(16): Xaa = Any Amino Acid
ACEFXXCANXPACTGC

SEQ ID NO: 10769 - protein, 17 aa, Artificial Sequence
  Synthetically generated peptide
  VARIANT (1)..(17): Xaa = Any Amino Acid
ACEFXXCANXXPACTGC

SEQ ID NO: 10770 - protein, 17 aa, Artificial Sequence
  Synthetically generated peptide
  VARIANT (1)..(17): Xaa = Any Amino Acid
ACEFXXCANXPXACTGC

SEQ ID NO: 10771 - protein, 17 aa, Artificial Sequence
  Synthetically generated peptide
  VARIANT (1)..(17): Xaa = Any Amino Acid
ACEFXXCANXPAXCTGC

SEQ ID NO: 10772 - protein, 17 aa, Artificial Sequence
  Synthetically generated peptide
  VARIANT (1)..(17): Xaa = Any Amino Acid
ACEFXXCANXPACXTGC

SEQ ID NO: 10773 - protein, 17 aa, Artificial Sequence
  Synthetically generated peptide
  VARIANT (1)..(17): Xaa = Any Amino Acid
ACEFXXCANXPACTXGC

SEQ ID NO: 10774 - protein, 17 aa, Artificial Sequence
  Synthetically generated peptide
  VARIANT (1)..(17): Xaa = Any Amino Acid
ACEFXXCANXPACTGXC

SEQ ID NO: 10775 - protein, 16 aa, Artificial Sequence
  Synthetically generated peptide
  VARIANT (1)..(16): Xaa = Any Amino Acid
ACEFXXCANPXACTGC

SEQ ID NO: 10776 - protein, 17 aa, Artificial Sequence
  Synthetically generated peptide
  VARIANT (1)..(17): Xaa = Any Amino Acid
ACEFXXCANPXXACTGC

SEQ ID NO: 10777 - protein, 17 aa, Artificial Sequence
  Synthetically generated peptide
  VARIANT (1)..(17): Xaa = Any Amino Acid
ACEFXXCANPXAXCTGC

SEQ ID NO: 10778 - protein, 17 aa, Artificial Sequence
  Synthetically generated peptide
  VARIANT (1)..(17): Xaa = Any Amino Acid
ACEFXXCANPXACXTGC

SEQ ID NO: 10779 - protein, 17 aa, Artificial Sequence
  Synthetically generated peptide
  VARIANT (1)..(17): Xaa = Any Amino Acid
ACEFXXCANPXACTXGC

SEQ ID NO: 10780 - protein, 17 aa, Artificial Sequence
  Synthetically generated peptide
  VARIANT (1)..(17): Xaa = Any Amino Acid
ACEFXXCANPXACTGXC

SEQ ID NO: 10781 - protein, 16 aa, Artificial Sequence
  Synthetically generated peptide
  VARIANT (1)..(16): Xaa = Any Amino Acid
ACEFXXCANPAXCTGC

SEQ ID NO: 10782 - protein, 17 aa, Artificial Sequence
  Synthetically generated peptide
  VARIANT (1)..(17): Xaa = Any Amino Acid
ACEFXXCANPAXXCTGC

SEQ ID NO: 10783 - protein, 17 aa, Artificial Sequence
  Synthetically generated peptide
  VARIANT (1)..(17): Xaa = Any Amino Acid
ACEFXXCANPAXCXTGC

SEQ ID NO: 10784 - protein, 17 aa, Artificial Sequence
  Synthetically generated peptide
  VARIANT (1)..(17): Xaa = Any Amino Acid
ACEFXXCANPAXCTXGC

SEQ ID NO: 10785 - protein, 17 aa, Artificial Sequence
  Synthetically generated peptide
  VARIANT (1)..(17): Xaa = Any Amino Acid
ACEFXXCANPAXCTGXC

SEQ ID NO: 10786 - protein, 16 aa, Artificial Sequence
  Synthetically generated peptide
  VARIANT (1)..(16): Xaa = Any Amino Acid
ACEFXXCANPACXTGC

SEQ ID NO: 10787 - protein, 17 aa, Artificial Sequence
  Synthetically generated peptide
  VARIANT (1)..(17): Xaa = Any Amino Acid
ACEFXXCANPACXXTGC

SEQ ID NO: 10788 - protein, 17 aa, Artificial Sequence
  Synthetically generated peptide
  VARIANT (1)..(17): Xaa = Any Amino Acid
ACEFXXCANPACXTXGC

SEQ ID NO: 10789 - protein, 17 aa, Artificial Sequence
  Synthetically generated peptide
  VARIANT (1)..(17): Xaa = Any Amino Acid
ACEFXXCANPACXTGXC

SEQ ID NO: 10790 - protein, 16 aa, Artificial Sequence
  Synthetically generated peptide
  VARIANT (1)..(16): Xaa = Any Amino Acid
ACEFXXCANPACTXGC

SEQ ID NO: 10791 - protein, 17 aa, Artificial Sequence
  Synthetically generated peptide
  VARIANT (1)..(17): Xaa = Any Amino Acid
ACEFXXCANPACTXXGC

SEQ ID NO: 10792 - protein, 17 aa, Artificial Sequence
  Synthetically generated peptide
  VARIANT (1)..(17): Xaa = Any Amino Acid
ACEFXXCANPACTXGXC

SEQ ID NO: 10793 - protein, 16 aa, Artificial Sequence
  Synthetically generated peptide
  VARIANT (1)..(16): Xaa = Any Amino Acid
ACEFXXCANPACTGXC

SEQ ID NO: 10794 - protein, 17 aa, Artificial Sequence
  Synthetically generated peptide
  VARIANT (1)..(17): Xaa = Any Amino Acid
ACEFXXCANPACTGXXC

SEQ ID NO: 10795 - protein, 15 aa, Artificial Sequence
  Synthetically generated peptide
  VARIANT (1)..(15): Xaa = Any Amino Acid
ACEFXCAXNPACTGC

SEQ ID NO: 10796 - protein, 16 aa, Artificial Sequence
  Synthetically generated peptide
  VARIANT (1)..(16): Xaa = Any Amino Acid
ACEFXCAXXNPACTGC

SEQ ID NO: 10797 - protein, 17 aa, Artificial Sequence
  Synthetically generated peptide
  VARIANT (1)..(17): Xaa = Any Amino Acid
ACEFXCAXXXNPACTGC

SEQ ID NO: 10798 - protein, 17 aa, Artificial Sequence
  Synthetically generated peptide
  VARIANT (1)..(17): Xaa = Any Amino Acid
ACEFXCAXXNXPACTGC

SEQ ID NO: 10799 - protein, 17 aa, Artificial Sequence
  Synthetically generated peptide
  VARIANT (1)..(17): Xaa = Any Amino Acid
ACEFXCAXXNPXACTGC

SEQ ID NO: 10800 - protein, 17 aa, Artificial Sequence
  Synthetically generated peptide
  VARIANT (1)..(17): Xaa = Any Amino Acid
ACEFXCAXXNPAXCTGC

SEQ ID NO: 10801 - protein, 17 aa, Artificial Sequence
  Synthetically generated peptide
  VARIANT (1)..(17): Xaa = Any Amino Acid
ACEFXCAXXNPACXTGC

SEQ ID NO: 10802 - protein, 17 aa, Artificial Sequence
  Synthetically generated peptide
  VARIANT (1)..(17): Xaa = Any Amino Acid
ACEFXCAXXNPACTXGC

SEQ ID NO: 10803 - protein, 17 aa, Artificial Sequence
  Synthetically generated peptide
  VARIANT (1)..(17): Xaa = Any Amino Acid
ACEFXCAXXNPACTGXC

SEQ ID NO: 10804 - protein, 16 aa, Artificial Sequence
  Synthetically generated peptide
  VARIANT (1)..(16): Xaa = Any Amino Acid
ACEFXCAXNXPACTGC

SEQ ID NO: 10805 - protein, 17 aa, Artificial Sequence
  Synthetically generated peptide
  VARIANT (1)..(17): Xaa = Any Amino Acid
ACEFXCAXNXXPACTGC

SEQ ID NO: 10806 - protein, 17 aa, Artificial Sequence
  Synthetically generated peptide
  VARIANT (1)..(17): Xaa = Any Amino Acid
ACEFXCAXNXPXACTGC

SEQ ID NO: 10807 - protein, 17 aa, Artificial Sequence
  Synthetically generated peptide
  VARIANT (1)..(17): Xaa = Any Amino Acid
ACEFXCAXNXPAXCTGC

SEQ ID NO: 10808 - protein, 17 aa, Artificial Sequence
  Synthetically generated peptide
  VARIANT (1)..(17): Xaa = Any Amino Acid
ACEFXCAXNXPACXTGC

SEQ ID NO: 10809 - protein, 17 aa, Artificial Sequence
  Synthetically generated peptide
  VARIANT (1)..(17): Xaa = Any Amino Acid
ACEFXCAXNXPACTXGC

SEQ ID NO: 10810 - protein, 17 aa, Artificial Sequence
  Synthetically generated peptide
  VARIANT (1)..(17): Xaa = Any Amino Acid
ACEFXCAXNXPACTGXC

SEQ ID NO: 10811 - protein, 16 aa, Artificial Sequence
  Synthetically generated peptide
  VARIANT (1)..(16): Xaa = Any Amino Acid
ACEFXCAXNPXACTGC

SEQ ID NO: 10812 - protein, 17 aa, Artificial Sequence
  Synthetically generated peptide
  VARIANT (1)..(17): Xaa = Any Amino Acid
ACEFXCAXNPXXACTGC

SEQ ID NO: 10813 - protein, 17 aa, Artificial Sequence
  Synthetically generated peptide
  VARIANT (1)..(17): Xaa = Any Amino Acid
ACEFXCAXNPXAXCTGC

SEQ ID NO: 10814 - protein, 17 aa, Artificial Sequence
  Synthetically generated peptide
  VARIANT (1)..(17): Xaa = Any Amino Acid
ACEFXCAXNPXACXTGC

SEQ ID NO: 10815 - protein, 17 aa, Artificial Sequence
  Synthetically generated peptide
  VARIANT (1)..(17): Xaa = Any Amino Acid
ACEFXCAXNPXACTXGC

SEQ ID NO: 10816 - protein, 17 aa, Artificial Sequence
  Synthetically generated peptide
  VARIANT (1)..(17): Xaa = Any Amino Acid
ACEFXCAXNPXACTGXC

SEQ ID NO: 10817 - protein, 16 aa, Artificial Sequence
  Synthetically generated peptide
  VARIANT (1)..(16): Xaa = Any Amino Acid
ACEFXCAXNPAXCTGC

SEQ ID NO: 10818 - protein, 17 aa, Artificial Sequence
  Synthetically generated peptide
  VARIANT (1)..(17): Xaa = Any Amino Acid
ACEFXCAXNPAXXCTGC

SEQ ID NO: 10819 - protein, 17 aa, Artificial Sequence
  Synthetically generated peptide
  VARIANT (1)..(17): Xaa = Any Amino Acid
ACEFXCAXNPAXCXTGC

SEQ ID NO: 10820 - protein, 17 aa, Artificial Sequence
  Synthetically generated peptide
  VARIANT (1)..(17): Xaa = Any Amino Acid
ACEFXCAXNPAXCTXGC

SEQ ID NO: 10821 - protein, 17 aa, Artificial Sequence
  Synthetically generated peptide
  VARIANT (1)..(17): Xaa = Any Amino Acid
ACEFXCAXNPAXCTGXC

SEQ ID NO: 10822 - protein, 16 aa, Artificial Sequence
  Synthetically generated peptide
  VARIANT (1)..(16): Xaa = Any Amino Acid
ACEFXCAXNPACXTGC

SEQ ID NO: 10823 - protein, 17 aa, Artificial Sequence
  Synthetically generated peptide
  VARIANT (1)..(17): Xaa = Any Amino Acid
ACEFXCAXNPACXXTGC

SEQ ID NO: 10824 - protein, 17 aa, Artificial Sequence
  Synthetically generated peptide
  VARIANT (1)..(17): Xaa = Any Amino Acid
ACEFXCAXNPACXTXGC

SEQ ID NO: 10825 - protein, 17 aa, Artificial Sequence
  Synthetically generated peptide
  VARIANT (1)..(17): Xaa = Any Amino Acid
ACEFXCAXNPACXTGXC

SEQ ID NO: 10826 - protein, 16 aa, Artificial Sequence
  Synthetically generated peptide
  VARIANT (1)..(16): Xaa = Any Amino Acid
ACEFXCAXNPACTXGC

SEQ ID NO: 10827 - protein, 17 aa, Artificial Sequence
  Synthetically generated peptide
  VARIANT (1)..(17): Xaa = Any Amino Acid
ACEFXCAXNPACTXXGC

SEQ ID NO: 10828 - protein, 17 aa, Artificial Sequence
  Synthetically generated peptide
  VARIANT (1)..(17): Xaa = Any Amino Acid
ACEFXCAXNPACTXGXC

SEQ ID NO: 10829 - protein, 16 aa, Artificial Sequence
  Synthetically generated peptide
  VARIANT (1)..(16): Xaa = Any Amino Acid
ACEFXCAXNPACTGXC

SEQ ID NO: 10830 - protein, 17 aa, Artificial Sequence
  Synthetically generated peptide
  VARIANT (1)..(17): Xaa = Any Amino Acid
ACEFXCAXNPACTGXXC

SEQ ID NO: 10831 - protein, 15 aa, Artificial Sequence
  Synthetically generated peptide
  VARIANT (1)..(15): Xaa = Any Amino Acid
ACEFXCANXPACTGC

SEQ ID NO: 10832 - protein, 16 aa, Artificial Sequence
  Synthetically generated peptide
  VARIANT (1)..(16): Xaa = Any Amino Acid
ACEFXCANXXPACTGC

SEQ ID NO: 10833 - protein, 17 aa, Artificial Sequence
  Synthetically generated peptide
  VARIANT (1)..(17): Xaa = Any Amino Acid
ACEFXCANXXXPACTGC

SEQ ID NO: 10834 - protein, 17 aa, Artificial Sequence
  Synthetically generated peptide
  VARIANT (1)..(17): Xaa = Any Amino Acid
ACEFXCANXXPXACTGC

SEQ ID NO: 10835 - protein, 17 aa, Artificial Sequence
  Synthetically generated peptide
  VARIANT (1)..(17): Xaa = Any Amino Acid
ACEFXCANXXPAXCTGC

SEQ ID NO: 10836 - protein, 17 aa, Artificial Sequence
  Synthetically generated peptide
  VARIANT (1)..(17): Xaa = Any Amino Acid
ACEFXCANXXPACXTGC

SEQ ID NO: 10837 - protein, 17 aa, Artificial Sequence
  Synthetically generated peptide
  VARIANT (1)..(17): Xaa = Any Amino Acid
ACEFXCANXXPACTXGC

SEQ ID NO: 10838 - protein, 17 aa, Artificial Sequence
  Synthetically generated peptide
  VARIANT (1)..(17): Xaa = Any Amino Acid
ACEFXCANXXPACTGXC

SEQ ID NO: 10839 - protein, 16 aa, Artificial Sequence
  Synthetically generated peptide
  VARIANT (1)..(16): Xaa = Any Amino Acid
ACEFXCANXPXACTGC

SEQ ID NO: 10840 - protein, 17 aa, Artificial Sequence
  Synthetically generated peptide
  VARIANT (1)..(17): Xaa = Any Amino Acid
ACEFXCANXPXXACTGC

SEQ ID NO: 10841 - protein, 17 aa, Artificial Sequence
  Synthetically generated peptide
  VARIANT (1)..(17): Xaa = Any Amino Acid
ACEFXCANXPXAXCTGC

SEQ ID NO: 10842 - protein, 17 aa, Artificial Sequence
  Synthetically generated peptide
  VARIANT (1)..(17): Xaa = Any Amino Acid
ACEFXCANXPXACXTGC

SEQ ID NO: 10843 - protein, 17 aa, Artificial Sequence
  Synthetically generated peptide
  VARIANT (1)..(17): Xaa = Any Amino Acid
ACEFXCANXPXACTXGC

SEQ ID NO: 10844 - protein, 17 aa, Artificial Sequence
  Synthetically generated peptide
  VARIANT (1)..(17): Xaa = Any Amino Acid
ACEFXCANXPXACTGXC

SEQ ID NO: 10845 - protein, 16 aa, Artificial Sequence
  Synthetically generated peptide
  VARIANT (1)..(16): Xaa = Any Amino Acid
ACEFXCANXPAXCTGC

SEQ ID NO: 10846 - protein, 17 aa, Artificial Sequence
  Synthetically generated peptide
  VARIANT (1)..(17): Xaa = Any Amino Acid
ACEFXCANXPAXXCTGC

SEQ ID NO: 10847 - protein, 17 aa, Artificial Sequence
  Synthetically generated peptide
  VARIANT (1)..(17): Xaa = Any Amino Acid
ACEFXCANXPAXCXTGC

SEQ ID NO: 10848 - protein, 17 aa, Artificial Sequence
  Synthetically generated peptide
  VARIANT (1)..(17): Xaa = Any Amino Acid
ACEFXCANXPAXCTXGC

SEQ ID NO: 10849 - protein, 17 aa, Artificial Sequence
  Synthetically generated peptide
  VARIANT (1)..(17): Xaa = Any Amino Acid
ACEFXCANXPAXCTGXC

SEQ ID NO: 10850 - protein, 16 aa, Artificial Sequence
  Synthetically generated peptide
  VARIANT (1)..(16): Xaa = Any Amino Acid
ACEFXCANXPACXTGC

SEQ ID NO: 10851 - protein, 17 aa, Artificial Sequence
  Synthetically generated peptide
  VARIANT (1)..(17): Xaa = Any Amino Acid
ACEFXCANXPACXXTGC

SEQ ID NO: 10852 - protein, 17 aa, Artificial Sequence
  Synthetically generated peptide
  VARIANT (1)..(17): Xaa = Any Amino Acid
ACEFXCANXPACXTXGC

SEQ ID NO: 10853 - protein, 17 aa, Artificial Sequence
  Synthetically generated peptide
  VARIANT (1)..(17): Xaa = Any Amino Acid
ACEFXCANXPACXTGXC

SEQ ID NO: 10854 - protein, 16 aa, Artificial Sequence
  Synthetically generated peptide
  VARIANT (1)..(16): Xaa = Any Amino Acid
ACEFXCANXPACTXGC

SEQ ID NO: 10855 - protein, 17 aa, Artificial Sequence
  Synthetically generated peptide
  VARIANT (1)..(17): Xaa = Any Amino Acid
ACEFXCANXPACTXXGC

SEQ ID NO: 10856 - protein, 17 aa, Artificial Sequence
  Synthetically generated peptide
  VARIANT (1)..(17): Xaa = Any Amino Acid
ACEFXCANXPACTXGXC

SEQ ID NO: 10857 - protein, 16 aa, Artificial Sequence
  Synthetically generated peptide
  VARIANT (1)..(16): Xaa = Any Amino Acid
ACEFXCANXPACTGXC

SEQ ID NO: 10858 - protein, 17 aa, Artificial Sequence
  Synthetically generated peptide
  VARIANT (1)..(17): Xaa = Any Amino Acid
ACEFXCANXPACTGXXC

SEQ ID NO: 10859 - protein, 15 aa, Artificial Sequence
  Synthetically generated peptide
  VARIANT (1)..(15): Xaa = Any Amino Acid
ACEFXCANPXACTGC

SEQ ID NO: 10860 - protein, 16 aa, Artificial Sequence
  Synthetically generated peptide
  VARIANT (1)..(16): Xaa = Any Amino Acid
ACEFXCANPXXACTGC

SEQ ID NO: 10861 - protein, 17 aa, Artificial Sequence
  Synthetically generated peptide
  VARIANT (1)..(17): Xaa = Any Amino Acid
ACEFXCANPXXXACTGC

SEQ ID NO: 10862 - protein, 17 aa, Artificial Sequence
  Synthetically generated peptide
  VARIANT (1)..(17): Xaa = Any Amino Acid
ACEFXCANPXXAXCTGC

SEQ ID NO: 10863 - protein, 17 aa, Artificial Sequence
  Synthetically generated peptide
  VARIANT (1)..(17): Xaa = Any Amino Acid
ACEFXCANPXXACXTGC

SEQ ID NO: 10864 - protein, 17 aa, Artificial Sequence
  Synthetically generated peptide
  VARIANT (1)..(17): Xaa = Any Amino Acid
ACEFXCANPXXACTXGC

SEQ ID NO: 10865 - protein, 17 aa, Artificial Sequence
  Synthetically generated peptide
  VARIANT (1)..(17): Xaa = Any Amino Acid
ACEFXCANPXXACTGXC

SEQ ID NO: 10866 - protein, 16 aa, Artificial Sequence
  Synthetically generated peptide
  VARIANT (1)..(16): Xaa = Any Amino Acid
ACEFXCANPXAXCTGC

SEQ ID NO: 10867 - protein, 17 aa, Artificial Sequence
  Synthetically generated peptide
  VARIANT (1)..(17): Xaa = Any Amino Acid
ACEFXCANPXAXXCTGC

SEQ ID NO: 10868 - protein, 17 aa, Artificial Sequence
  Synthetically generated peptide
  VARIANT (1)..(17): Xaa = Any Amino Acid
ACEFXCANPXAXCXTGC

SEQ ID NO: 10869 - protein, 17 aa, Artificial Sequence
  Synthetically generated peptide
  VARIANT (1)..(17): Xaa = Any Amino Acid
ACEFXCANPXAXCTXGC

SEQ ID NO: 10870 - protein, 17 aa, Artificial Sequence
  Synthetically generated peptide
  VARIANT (1)..(17): Xaa = Any Amino Acid
ACEFXCANPXAXCTGXC

SEQ ID NO: 10871 - protein, 16 aa, Artificial Sequence
  Synthetically generated peptide
  VARIANT (1)..(16): Xaa = Any Amino Acid
ACEFXCANPXACXTGC

SEQ ID NO: 10872 - protein, 17 aa, Artificial Sequence
  Synthetically generated peptide
  VARIANT (1)..(17): Xaa = Any Amino Acid
ACEFXCANPXACXXTGC

SEQ ID NO: 10873 - protein, 17 aa, Artificial Sequence
  Synthetically generated peptide
  VARIANT (1)..(17): Xaa = Any Amino Acid
ACEFXCANPXACXTXGC

SEQ ID NO: 10874 - protein, 17 aa, Artificial Sequence
  Synthetically generated peptide
  VARIANT (1)..(17): Xaa = Any Amino Acid
ACEFXCANPXACXTGXC

SEQ ID NO: 10875 - protein, 16 aa, Artificial Sequence
  Synthetically generated peptide
  VARIANT (1)..(16): Xaa = Any Amino Acid
ACEFXCANPXACTXGC

SEQ ID NO: 10876 - protein, 17 aa, Artificial Sequence
  Synthetically generated peptide
  VARIANT (1)..(17): Xaa = Any Amino Acid
ACEFXCANPXACTXXGC

SEQ ID NO: 10877 - protein, 17 aa, Artificial Sequence
  Synthetically generated peptide
  VARIANT (1)..(17): Xaa = Any Amino Acid
ACEFXCANPXACTXGXC

SEQ ID NO: 10878 - protein, 16 aa, Artificial Sequence
  Synthetically generated peptide
  VARIANT (1)..(16): Xaa = Any Amino Acid
ACEFXCANPXACTGXC

SEQ ID NO: 10879 - protein, 17 aa, Artificial Sequence
  Synthetically generated peptide
  VARIANT (1)..(17): Xaa = Any Amino Acid
ACEFXCANPXACTGXXC

SEQ ID NO: 10880 - protein, 15 aa, Artificial Sequence
  Synthetically generated peptide
  VARIANT (1)..(15): Xaa = Any Amino Acid
ACEFXCANPAXCTGC

SEQ ID NO: 10881 - protein, 16 aa, Artificial Sequence
  Synthetically generated peptide
  VARIANT (1)..(16): Xaa = Any Amino Acid
ACEFXCANPAXXCTGC

SEQ ID NO: 10882 - protein, 17 aa, Artificial Sequence
  Synthetically generated peptide
  VARIANT (1)..(17): Xaa = Any Amino Acid
ACEFXCANPAXXXCTGC

SEQ ID NO: 10883 - protein, 17 aa, Artificial Sequence
  Synthetically generated peptide
  VARIANT (1)..(17): Xaa = Any Amino Acid
ACEFXCANPAXXCXTGC

SEQ ID NO: 10884 - protein, 17 aa, Artificial Sequence
  Synthetically generated peptide
  VARIANT (1)..(17): Xaa = Any Amino Acid
ACEFXCANPAXXCTXGC

SEQ ID NO: 10885 - protein, 17 aa, Artificial Sequence
  Synthetically generated peptide
  VARIANT (1)..(17): Xaa = Any Amino Acid
ACEFXCANPAXXCTGXC

SEQ ID NO: 10886 - protein, 16 aa, Artificial Sequence
  Synthetically generated peptide
  VARIANT (1)..(16): Xaa = Any Amino Acid
ACEFXCANPAXCXTGC

SEQ ID NO: 10887 - protein, 17 aa, Artificial Sequence
  Synthetically generated peptide
  VARIANT (1)..(17): Xaa = Any Amino Acid
ACEFXCANPAXCXXTGC

SEQ ID NO: 10888 - protein, 17 aa, Artificial Sequence
  Synthetically generated peptide
  VARIANT (1)..(17): Xaa = Any Amino Acid
ACEFXCANPAXCXTXGC

SEQ ID NO: 10889 - protein, 17 aa, Artificial Sequence
  Synthetically generated peptide
  VARIANT (1)..(17): Xaa = Any Amino Acid
ACEFXCANPAXCXTGXC

SEQ ID NO: 10890 - protein, 16 aa, Artificial Sequence
  Synthetically generated peptide
  VARIANT (1)..(16): Xaa = Any Amino Acid
ACEFXCANPAXCTXGC

SEQ ID NO: 10891 - protein, 17 aa, Artificial Sequence
  Synthetically generated peptide
  VARIANT (1)..(17): Xaa = Any Amino Acid
ACEFXCANPAXCTXXGC

SEQ ID NO: 10892 - protein, 17 aa, Artificial Sequence
  Synthetically generated peptide
  VARIANT (1)..(17): Xaa = Any Amino Acid
ACEFXCANPAXCTXGXC

SEQ ID NO: 10893 - protein, 16 aa, Artificial Sequence
  Synthetically generated peptide
  VARIANT (1)..(16): Xaa = Any Amino Acid
ACEFXCANPAXCTGXC

SEQ ID NO: 10894 - protein, 17 aa, Artificial Sequence
  Synthetically generated peptide
  VARIANT (1)..(17): Xaa = Any Amino Acid
ACEFXCANPAXCTGXXC

SEQ ID NO: 10895 - protein, 15 aa, Artificial Sequence
  Synthetically generated peptide
  VARIANT (1)..(15): Xaa = Any Amino Acid
ACEFXCANPACXTGC

SEQ ID NO: 10896 - protein, 16 aa, Artificial Sequence
  Synthetically generated peptide
  VARIANT (1)..(16): Xaa = Any Amino Acid
ACEFXCANPACXXTGC

SEQ ID NO: 10897 - protein, 17 aa, Artificial Sequence
  Synthetically generated peptide
  VARIANT (1)..(17): Xaa = Any Amino Acid
ACEFXCANPACXXXTGC

SEQ ID NO: 10898 - protein, 17 aa, Artificial Sequence
  Synthetically generated peptide
  VARIANT (1)..(17): Xaa = Any Amino Acid
ACEFXCANPACXXTXGC

SEQ ID NO: 10899 - protein, 17 aa, Artificial Sequence
  Synthetically generated peptide
  VARIANT (1)..(17): Xaa = Any Amino Acid
ACEFXCANPACXXTGXC

SEQ ID NO: 10900 - protein, 16 aa, Artificial Sequence
  Synthetically generated peptide
  VARIANT (1)..(16): Xaa = Any Amino Acid
ACEFXCANPACXTXGC

SEQ ID NO: 10901 - protein, 17 aa, Artificial Sequence
  Synthetically generated peptide
  VARIANT (1)..(17): Xaa = Any Amino Acid
ACEFXCANPACXTXXGC

SEQ ID NO: 10902 - protein, 17 aa, Artificial Sequence
  Synthetically generated peptide
  VARIANT (1)..(17): Xaa = Any Amino Acid
ACEFXCANPACXTXGXC

SEQ ID NO: 10903 - protein, 16 aa, Artificial Sequence
  Synthetically generated peptide
  VARIANT (1)..(16): Xaa = Any Amino Acid
ACEFXCANPACXTGXC

SEQ ID NO: 10904 - protein, 17 aa, Artificial Sequence
  Synthetically generated peptide
  VARIANT (1)..(17): Xaa = Any Amino Acid
ACEFXCANPACXTGXXC

SEQ ID NO: 10905 - protein, 15 aa, Artificial Sequence
  Synthetically generated peptide
  VARIANT (1)..(15): Xaa = Any Amino Acid
ACEFXCANPACTXGC

SEQ ID NO: 10906 - protein, 16 aa, Artificial Sequence
  Synthetically generated peptide
  VARIANT (1)..(16): Xaa = Any Amino Acid
ACEFXCANPACTXXGC

SEQ ID NO: 10907 - protein, 17 aa, Artificial Sequence
  Synthetically generated peptide
  VARIANT (1)..(17): Xaa = Any Amino Acid
ACEFXCANPACTXXXGC

SEQ ID NO: 10908 - protein, 17 aa, Artificial Sequence
  Synthetically generated peptide
  VARIANT (1)..(17): Xaa = Any Amino Acid
ACEFXCANPACTXXGXC

SEQ ID NO: 10909 - protein, 16 aa, Artificial Sequence
  Synthetically generated peptide
  VARIANT (1)..(16): Xaa = Any Amino Acid
ACEFXCANPACTXGXC

SEQ ID NO: 10910 - protein, 17 aa, Artificial Sequence
  Synthetically generated peptide
  VARIANT (1)..(17): Xaa = Any Amino Acid
ACEFXCANPACTXGXXC

SEQ ID NO: 10911 - protein, 15 aa, Artificial Sequence
  Synthetically generated peptide
  VARIANT (1)..(15): Xaa = Any Amino Acid
ACEFXCANPACTGXC

SEQ ID NO: 10912 - protein, 16 aa, Artificial Sequence
  Synthetically generated peptide
  VARIANT (1)..(16): Xaa = Any Amino Acid
ACEFXCANPACTGXXC

SEQ ID NO: 10913 - protein, 17 aa, Artificial Sequence
  Synthetically generated peptide
  VARIANT (1)..(17): Xaa = Any Amino Acid
ACEFXCANPACTGXXXC

SEQ ID NO: 10914 - protein, 14 aa, Artificial Sequence
  Synthetically generated peptide
  VARIANT (1)..(14): Xaa = Any Amino Acid
ACEFCAXNPACTGC

SEQ ID NO: 10915 - protein, 15 aa, Artificial Sequence
  Synthetically generated peptide
  VARIANT (1)..(15): Xaa = Any Amino Acid
ACEFCAXXNPACTGC

SEQ ID NO: 10916 - protein, 16 aa, Artificial Sequence
  Synthetically generated peptide
  VARIANT (1)..(16): Xaa = Any Amino Acid
ACEFCAXXXNPACTGC

SEQ ID NO: 10917 - protein, 17 aa, Artificial Sequence
  Synthetically generated peptide
  VARIANT (1)..(17): Xaa = Any Amino Acid
ACEFCAXXXXNPACTGC

SEQ ID NO: 10918 - protein, 17 aa, Artificial Sequence
  Synthetically generated peptide
  VARIANT (1)..(17): Xaa = Any Amino Acid
ACEFCAXXXNXPACTGC

SEQ ID NO: 10919 - protein, 17 aa, Artificial Sequence
  Synthetically generated peptide
  VARIANT (1)..(17): Xaa = Any Amino Acid
ACEFCAXXXNPXACTGC

SEQ ID NO: 10920 - protein, 17 aa, Artificial Sequence
  Synthetically generated peptide
  VARIANT (1)..(17): Xaa = Any Amino Acid
ACEFCAXXXNPAXCTGC

SEQ ID NO: 10921 - protein, 17 aa, Artificial Sequence
  Synthetically generated peptide
  VARIANT (1)..(17): Xaa = Any Amino Acid
ACEFCAXXXNPACXTGC

SEQ ID NO: 10922 - protein, 17 aa, Artificial Sequence
  Synthetically generated peptide
  VARIANT (1)..(17): Xaa = Any Amino Acid
ACEFCAXXXNPACTXGC

SEQ ID NO: 10923 - protein, 17 aa, Artificial Sequence
  Synthetically generated peptide
  VARIANT (1)..(17): Xaa = Any Amino Acid
ACEFCAXXXNPACTGXC

SEQ ID NO: 10924 - protein, 16 aa, Artificial Sequence
  Synthetically generated peptide
  VARIANT (1)..(16): Xaa = Any Amino Acid
ACEFCAXXNXPACTGC

SEQ ID NO: 10925 - protein, 17 aa, Artificial Sequence
  Synthetically generated peptide
  VARIANT (1)..(17): Xaa = Any Amino Acid
ACEFCAXXNXXPACTGC

SEQ ID NO: 10926 - protein, 17 aa, Artificial Sequence
  Synthetically generated peptide
  VARIANT (1)..(17): Xaa = Any Amino Acid
ACEFCAXXNXPXACTGC

SEQ ID NO: 10927 - protein, 17 aa, Artificial Sequence
  Synthetically generated peptide
  VARIANT (1)..(17): Xaa = Any Amino Acid
ACEFCAXXNXPAXCTGC

SEQ ID NO: 10928 - protein, 17 aa, Artificial Sequence
  Synthetically generated peptide
  VARIANT (1)..(17): Xaa = Any Amino Acid
ACEFCAXXNXPACXTGC

SEQ ID NO: 10929 - protein, 17 aa, Artificial Sequence
  Synthetically generated peptide
  VARIANT (1)..(17): Xaa = Any Amino Acid
ACEFCAXXNXPACTXGC

SEQ ID NO: 10930 - protein, 17 aa, Artificial Sequence
  Synthetically generated peptide
  VARIANT (1)..(17): Xaa = Any Amino Acid
ACEFCAXXNXPACTGXC

SEQ ID NO: 10931 - protein, 16 aa, Artificial Sequence
  Synthetically generated peptide
  VARIANT (1)..(16): Xaa = Any Amino Acid
ACEFCAXXNPXACTGC

SEQ ID NO: 10932 - protein, 17 aa, Artificial Sequence
  Synthetically generated peptide
  VARIANT (1)..(17): Xaa = Any Amino Acid
ACEFCAXXNPXXACTGC

SEQ ID NO: 10933 - protein, 17 aa, Artificial Sequence
  Synthetically generated peptide
  VARIANT (1)..(17): Xaa = Any Amino Acid
ACEFCAXXNPXAXCTGC

SEQ ID NO: 10934 - protein, 17 aa, Artificial Sequence
  Synthetically generated peptide
  VARIANT (1)..(17): Xaa = Any Amino Acid
ACEFCAXXNPXACXTGC

SEQ ID NO: 10935 - protein, 17 aa, Artificial Sequence
  Synthetically generated peptide
  VARIANT (1)..(17): Xaa = Any Amino Acid
ACEFCAXXNPXACTXGC

SEQ ID NO: 10936 - protein, 17 aa, Artificial Sequence
  Synthetically generated peptide
  VARIANT (1)..(17): Xaa = Any Amino Acid
ACEFCAXXNPXACTGXC

SEQ ID NO: 10937 - protein, 16 aa, Artificial Sequence
  Synthetically generated peptide
  VARIANT (1)..(16): Xaa = Any Amino Acid
ACEFCAXXNPAXCTGC

SEQ ID NO: 10938 - protein, 17 aa, Artificial Sequence
  Synthetically generated peptide
  VARIANT (1)..(17): Xaa = Any Amino Acid
ACEFCAXXNPAXXCTGC

SEQ ID NO: 10939 - protein, 17 aa, Artificial Sequence
  Synthetically generated peptide
  VARIANT (1)..(17): Xaa = Any Amino Acid
ACEFCAXXNPAXCXTGC

SEQ ID NO: 10940 - protein, 17 aa, Artificial Sequence
  Synthetically generated peptide
  VARIANT (1)..(17): Xaa = Any Amino Acid
ACEFCAXXNPAXCTXGC

SEQ ID NO: 10941 - protein, 17 aa, Artificial Sequence
  Synthetically generated peptide
  VARIANT (1)..(17): Xaa = Any Amino Acid
ACEFCAXXNPAXCTGXC

SEQ ID NO: 10942 - protein, 16 aa, Artificial Sequence
  Synthetically generated peptide
  VARIANT (1)..(16): Xaa = Any Amino Acid
ACEFCAXXNPACXTGC

SEQ ID NO: 10943 - protein, 17 aa, Artificial Sequence
  Synthetically generated peptide
  VARIANT (1)..(17): Xaa = Any Amino Acid
ACEFCAXXNPACXXTGC

SEQ ID NO: 10944 - protein, 17 aa, Artificial Sequence
  Synthetically generated peptide
  VARIANT (1)..(17): Xaa = Any Amino Acid
ACEFCAXXNPACXTXGC

SEQ ID NO: 10945 - protein, 17 aa, Artificial Sequence
  Synthetically generated peptide
  VARIANT (1)..(17): Xaa = Any Amino Acid
ACEFCAXXNPACXTGXC

SEQ ID NO: 10946 - protein, 16 aa, Artificial Sequence
  Synthetically generated peptide
  VARIANT (1)..(16): Xaa = Any Amino Acid
ACEFCAXXNPACTXGC

SEQ ID NO: 10947 - protein, 17 aa, Artificial Sequence
  Synthetically generated peptide
  VARIANT (1)..(17): Xaa = Any Amino Acid
ACEFCAXXNPACTXXGC

SEQ ID NO: 10948 - protein, 17 aa, Artificial Sequence
  Synthetically generated peptide
  VARIANT (1)..(17): Xaa = Any Amino Acid
ACEFCAXXNPACTXGXC

SEQ ID NO: 10949 - protein, 16 aa, Artificial Sequence
  Synthetically generated peptide
  VARIANT (1)..(16): Xaa = Any Amino Acid
ACEFCAXXNPACTGXC

SEQ ID NO: 10950 - protein, 17 aa, Artificial Sequence
  Synthetically generated peptide
  VARIANT (1)..(17): Xaa = Any Amino Acid
ACEFCAXXNPACTGXXC

SEQ ID NO: 10951 - protein, 15 aa, Artificial Sequence
  Synthetically generated peptide
  VARIANT (1)..(15): Xaa = Any Amino Acid
ACEFCAXNXPACTGC

SEQ ID NO: 10952 - protein, 16 aa, Artificial Sequence
  Synthetically generated peptide
  VARIANT (1)..(16): Xaa = Any Amino Acid
ACEFCAXNXXPACTGC

SEQ ID NO: 10953 - protein, 17 aa, Artificial Sequence
  Synthetically generated peptide
  VARIANT (1)..(17): Xaa = Any Amino Acid
ACEFCAXNXXXPACTGC

SEQ ID NO: 10954 - protein, 17 aa, Artificial Sequence
  Synthetically generated peptide
  VARIANT (1)..(17): Xaa = Any Amino Acid
ACEFCAXNXXPXACTGC

SEQ ID NO: 10955 - protein, 17 aa, Artificial Sequence
  Synthetically generated peptide
  VARIANT (1)..(17): Xaa = Any Amino Acid
ACEFCAXNXXPAXCTGC

SEQ ID NO: 10956 - protein, 17 aa, Artificial Sequence
  Synthetically generated peptide
  VARIANT (1)..(17): Xaa = Any Amino Acid
ACEFCAXNXXPACXTGC

SEQ ID NO: 10957 - protein, 17 aa, Artificial Sequence
  Synthetically generated peptide
  VARIANT (1)..(17): Xaa = Any Amino Acid
ACEFCAXNXXPACTXGC

SEQ ID NO: 10958 - protein, 17 aa, Artificial Sequence
  Synthetically generated peptide
  VARIANT (1)..(17): Xaa = Any Amino Acid
ACEFCAXNXXPACTGXC

SEQ ID NO: 10959 - protein, 16 aa, Artificial Sequence
  Synthetically generated peptide
  VARIANT (1)..(16): Xaa = Any Amino Acid
ACEFCAXNXPXACTGC

SEQ ID NO: 10960 - protein, 17 aa, Artificial Sequence
  Synthetically generated peptide
  VARIANT (1)..(17): Xaa = Any Amino Acid
ACEFCAXNXPXXACTGC

SEQ ID NO: 10961 - protein, 17 aa, Artificial Sequence
  Synthetically generated peptide
  VARIANT (1)..(17): Xaa = Any Amino Acid
ACEFCAXNXPXAXCTGC

SEQ ID NO: 10962 - protein, 17 aa, Artificial Sequence
  Synthetically generated peptide
  VARIANT (1)..(17): Xaa = Any Amino Acid
ACEFCAXNXPXACXTGC

SEQ ID NO: 10963 - protein, 17 aa, Artificial Sequence
  Synthetically generated peptide
  VARIANT (1)..(17): Xaa = Any Amino Acid
ACEFCAXNXPXACTXGC

SEQ ID NO: 10964 - protein, 17 aa, Artificial Sequence
  Synthetically generated peptide
  VARIANT (1)..(17): Xaa = Any Amino Acid
ACEFCAXNXPXACTGXC

SEQ ID NO: 10965 - protein, 16 aa, Artificial Sequence
  Synthetically generated peptide
  VARIANT (1)..(16): Xaa = Any Amino Acid
ACEFCAXNXPAXCTGC

SEQ ID NO: 10966 - protein, 17 aa, Artificial Sequence
  Synthetically generated peptide
  VARIANT (1)..(17): Xaa = Any Amino Acid
ACEFCAXNXPAXXCTGC

SEQ ID NO: 10967 - protein, 17 aa, Artificial Sequence
  Synthetically generated peptide
  VARIANT (1)..(17): Xaa = Any Amino Acid
ACEFCAXNXPAXCXTGC

SEQ ID NO: 10968 - protein, 17 aa, Artificial Sequence
  Synthetically generated peptide
  VARIANT (1)..(17): Xaa = Any Amino Acid
ACEFCAXNXPAXCTXGC

SEQ ID NO: 10969 - protein, 17 aa, Artificial Sequence
  Synthetically generated peptide
  VARIANT (1)..(17): Xaa = Any Amino Acid
ACEFCAXNXPAXCTGXC

SEQ ID NO: 10970 - protein, 16 aa, Artificial Sequence
  Synthetically generated peptide
  VARIANT (1)..(16): Xaa = Any Amino Acid
ACEFCAXNXPACXTGC

SEQ ID NO: 10971 - protein, 17 aa, Artificial Sequence
  Synthetically generated peptide
  VARIANT (1)..(17): Xaa = Any Amino Acid
ACEFCAXNXPACXXTGC

SEQ ID NO: 10972 - protein, 17 aa, Artificial Sequence
  Synthetically generated peptide
  VARIANT (1)..(17): Xaa = Any Amino Acid
ACEFCAXNXPACXTXGC

SEQ ID NO: 10973 - protein, 17 aa, Artificial Sequence
  Synthetically generated peptide
  VARIANT (1)..(17): Xaa = Any Amino Acid
ACEFCAXNXPACXTGXC

SEQ ID NO: 10974 - protein, 16 aa, Artificial Sequence
  Synthetically generated peptide
  VARIANT (1)..(16): Xaa = Any Amino Acid
ACEFCAXNXPACTXGC

SEQ ID NO: 10975 - protein, 17 aa, Artificial Sequence
  Synthetically generated peptide
  VARIANT (1)..(17): Xaa = Any Amino Acid
ACEFCAXNXPACTXXGC

SEQ ID NO: 10976 - protein, 17 aa, Artificial Sequence
  Synthetically generated peptide
  VARIANT (1)..(17): Xaa = Any Amino Acid
ACEFCAXNXPACTXGXC

SEQ ID NO: 10977 - protein, 16 aa, Artificial Sequence
  Synthetically generated peptide
  VARIANT (1)..(16): Xaa = Any Amino Acid
ACEFCAXNXPACTGXC

SEQ ID NO: 10978 - protein, 17 aa, Artificial Sequence
  Synthetically generated peptide
  VARIANT (1)..(17): Xaa = Any Amino Acid
ACEFCAXNXPACTGXXC

SEQ ID NO: 10979 - protein, 15 aa, Artificial Sequence
  Synthetically generated peptide
  VARIANT (1)..(15): Xaa = Any Amino Acid
ACEFCAXNPXACTGC

SEQ ID NO: 10980 - protein, 16 aa, Artificial Sequence
  Synthetically generated peptide
  VARIANT (1)..(16): Xaa = Any Amino Acid
ACEFCAXNPXXACTGC

SEQ ID NO: 10981 - protein, 17 aa, Artificial Sequence
  Synthetically generated peptide
  VARIANT (1)..(17): Xaa = Any Amino Acid
ACEFCAXNPXXXACTGC

SEQ ID NO: 10982 - protein, 17 aa, Artificial Sequence
  Synthetically generated peptide
  VARIANT (1)..(17): Xaa = Any Amino Acid
ACEFCAXNPXXAXCTGC

SEQ ID NO: 10983 - protein, 17 aa, Artificial Sequence
  Synthetically generated peptide
  VARIANT (1)..(17): Xaa = Any Amino Acid
ACEFCAXNPXXACXTGC

SEQ ID NO: 10984 - protein, 17 aa, Artificial Sequence
  Synthetically generated peptide
  VARIANT (1)..(17): Xaa = Any Amino Acid
ACEFCAXNPXXACTXGC

SEQ ID NO: 10985 - protein, 17 aa, Artificial Sequence
  Synthetically generated peptide
  VARIANT (1)..(17): Xaa = Any Amino Acid
ACEFCAXNPXXACTGXC

SEQ ID NO: 10986 - protein, 16 aa, Artificial Sequence
  Synthetically generated peptide
  VARIANT (1)..(16): Xaa = Any Amino Acid
ACEFCAXNPXAXCTGC

SEQ ID NO: 10987 - protein, 17 aa, Artificial Sequence
  Synthetically generated peptide
  VARIANT (1)..(17): Xaa = Any Amino Acid
ACEFCAXNPXAXXCTGC

SEQ ID NO: 10988 - protein, 17 aa, Artificial Sequence
  Synthetically generated peptide
  VARIANT (1)..(17): Xaa = Any Amino Acid
ACEFCAXNPXAXCXTGC

SEQ ID NO: 10989 - protein, 17 aa, Artificial Sequence
  Synthetically generated peptide
  VARIANT (1)..(17): Xaa = Any Amino Acid
ACEFCAXNPXAXCTXGC

SEQ ID NO: 10990 - protein, 17 aa, Artificial Sequence
  Synthetically generated peptide
  VARIANT (1)..(17): Xaa = Any Amino Acid
ACEFCAXNPXAXCTGXC

SEQ ID NO: 10991 - protein, 16 aa, Artificial Sequence
  Synthetically generated peptide
  VARIANT (1)..(16): Xaa = Any Amino Acid
ACEFCAXNPXACXTGC

SEQ ID NO: 10992 - protein, 17 aa, Artificial Sequence
  Synthetically generated peptide
  VARIANT (1)..(17): Xaa = Any Amino Acid
ACEFCAXNPXACXXTGC

SEQ ID NO: 10993 - protein, 17 aa, Artificial Sequence
  Synthetically generated peptide
  VARIANT (1)..(17): Xaa = Any Amino Acid
ACEFCAXNPXACXTXGC

SEQ ID NO: 10994 - protein, 17 aa, Artificial Sequence
  Synthetically generated peptide
  VARIANT (1)..(17): Xaa = Any Amino Acid
ACEFCAXNPXACXTGXC

SEQ ID NO: 10995 - protein, 16 aa, Artificial Sequence
  Synthetically generated peptide
  VARIANT (1)..(16): Xaa = Any Amino Acid
ACEFCAXNPXACTXGC

SEQ ID NO: 10996 - protein, 17 aa, Artificial Sequence
  Synthetically generated peptide
  VARIANT (1)..(17): Xaa = Any Amino Acid
ACEFCAXNPXACTXXGC

SEQ ID NO: 10997 - protein, 17 aa, Artificial Sequence
  Synthetically generated peptide
  VARIANT (1)..(17): Xaa = Any Amino Acid
ACEFCAXNPXACTXGXC

SEQ ID NO: 10998 - protein, 16 aa, Artificial Sequence
  Synthetically generated peptide
  VARIANT (1)..(16): Xaa = Any Amino Acid
ACEFCAXNPXACTGXC

SEQ ID NO: 10999 - protein, 17 aa, Artificial Sequence
  Synthetically generated peptide
  VARIANT (1)..(17): Xaa = Any Amino Acid
ACEFCAXNPXACTGXXC

SEQ ID NO: 11000 - protein, 15 aa, Artificial Sequence
  Synthetically generated peptide
  VARIANT (1)..(15): Xaa = Any Amino Acid
ACEFCAXNPAXCTGC

SEQ ID NO: 11001 - protein, 16 aa, Artificial Sequence
  Synthetically generated peptide
  VARIANT (1)..(16): Xaa = Any Amino Acid
ACEFCAXNPAXXCTGC

SEQ ID NO: 11002 - protein, 17 aa, Artificial Sequence
  Synthetically generated peptide
  VARIANT (1)..(17): Xaa = Any Amino Acid
ACEFCAXNPAXXXCTGC

SEQ ID NO: 11003 - protein, 17 aa, Artificial Sequence
  Synthetically generated peptide
  VARIANT (1)..(17): Xaa = Any Amino Acid
ACEFCAXNPAXXCXTGC

SEQ ID NO: 11004 - protein, 17 aa, Artificial Sequence
  Synthetically generated peptide
  VARIANT (1)..(17): Xaa = Any Amino Acid
ACEFCAXNPAXXCTXGC

SEQ ID NO: 11005 - protein, 17 aa, Artificial Sequence
  Synthetically generated peptide
  VARIANT (1)..(17): Xaa = Any Amino Acid
ACEFCAXNPAXXCTGXC

SEQ ID NO: 11006 - protein, 16 aa, Artificial Sequence
  Synthetically generated peptide
  VARIANT (1)..(16): Xaa = Any Amino Acid
ACEFCAXNPAXCXTGC

SEQ ID NO: 11007 - protein, 17 aa, Artificial Sequence
  Synthetically generated peptide
  VARIANT (1)..(17): Xaa = Any Amino Acid
ACEFCAXNPAXCXXTGC

SEQ ID NO: 11008 - protein, 17 aa, Artificial Sequence
  Synthetically generated peptide
  VARIANT (1)..(17): Xaa = Any Amino Acid
ACEFCAXNPAXCXTXGC

SEQ ID NO: 11009 - protein, 17 aa, Artificial Sequence
  Synthetically generated peptide
  VARIANT (1)..(17): Xaa = Any Amino Acid
ACEFCAXNPAXCXTGXC

SEQ ID NO: 11010 - protein, 16 aa, Artificial Sequence
  Synthetically generated peptide
  VARIANT (1)..(16): Xaa = Any Amino Acid
ACEFCAXNPAXCTXGC

SEQ ID NO: 11011 - protein, 17 aa, Artificial Sequence
  Synthetically generated peptide
  VARIANT (1)..(17): Xaa = Any Amino Acid
ACEFCAXNPAXCTXXGC

SEQ ID NO: 11012 - protein, 17 aa, Artificial Sequence
  Synthetically generated peptide
  VARIANT (1)..(17): Xaa = Any Amino Acid
ACEFCAXNPAXCTXGXC

SEQ ID NO: 11013 - protein, 16 aa, Artificial Sequence
  Synthetically generated peptide
  VARIANT (1)..(16): Xaa = Any Amino Acid
ACEFCAXNPAXCTGXC

SEQ ID NO: 11014 - protein, 17 aa, Artificial Sequence
  Synthetically generated peptide
  VARIANT (1)..(17): Xaa = Any Amino Acid
ACEFCAXNPAXCTGXXC

SEQ ID NO: 11015 - protein, 15 aa, Artificial Sequence
  Synthetically generated peptide
  VARIANT (1)..(15): Xaa = Any Amino Acid
ACEFCAXNPACXTGC

SEQ ID NO: 11016 - protein, 16 aa, Artificial Sequence
  Synthetically generated peptide
  VARIANT (1)..(16): Xaa = Any Amino Acid
ACEFCAXNPACXXTGC

SEQ ID NO: 11017 - protein, 17 aa, Artificial Sequence
  Synthetically generated peptide
  VARIANT (1)..(17): Xaa = Any Amino Acid
ACEFCAXNPACXXXTGC

SEQ ID NO: 11018 - protein, 17 aa, Artificial Sequence
  Synthetically generated peptide
  VARIANT (1)..(17): Xaa = Any Amino Acid
ACEFCAXNPACXXTXGC

SEQ ID NO: 11019 - protein, 17 aa, Artificial Sequence
  Synthetically generated peptide
  VARIANT (1)..(17): Xaa = Any Amino Acid
ACEFCAXNPACXXTGXC

SEQ ID NO: 11020 - protein, 16 aa, Artificial Sequence
  Synthetically generated peptide
  VARIANT (1)..(16): Xaa = Any Amino Acid
ACEFCAXNPACXTXGC

SEQ ID NO: 11021 - protein, 17 aa, Artificial Sequence
  Synthetically generated peptide
  VARIANT (1)..(17): Xaa = Any Amino Acid
ACEFCAXNPACXTXXGC

SEQ ID NO: 11022 - protein, 17 aa, Artificial Sequence
  Synthetically generated peptide
  VARIANT (1)..(17): Xaa = Any Amino Acid
ACEFCAXNPACXTXGXC

SEQ ID NO: 11023 - protein, 16 aa, Artificial Sequence
  Synthetically generated peptide
  VARIANT (1)..(16): Xaa = Any Amino Acid
ACEFCAXNPACXTGXC

SEQ ID NO: 11024 - protein, 17 aa, Artificial Sequence
  Synthetically generated peptide
  VARIANT (1)..(17): Xaa = Any Amino Acid
ACEFCAXNPACXTGXXC

SEQ ID NO: 11025 - protein, 15 aa, Artificial Sequence
  Synthetically generated peptide
  VARIANT (1)..(15): Xaa = Any Amino Acid
ACEFCAXNPACTXGC

SEQ ID NO: 11026 - protein, 16 aa, Artificial Sequence
  Synthetically generated peptide
  VARIANT (1)..(16): Xaa = Any Amino Acid
ACEFCAXNPACTXXGC

SEQ ID NO: 11027 - protein, 17 aa, Artificial Sequence
  Synthetically generated peptide
  VARIANT (1)..(17): Xaa = Any Amino Acid
ACEFCAXNPACTXXXGC

SEQ ID NO: 11028 - protein, 17 aa, Artificial Sequence
  Synthetically generated peptide
  VARIANT (1)..(17): Xaa = Any Amino Acid
ACEFCAXNPACTXXGXC

SEQ ID NO: 11029 - protein, 16 aa, Artificial Sequence
  Synthetically generated peptide
  VARIANT (1)..(16): Xaa = Any Amino Acid
ACEFCAXNPACTXGXC

SEQ ID NO: 11030 - protein, 17 aa, Artificial Sequence
  Synthetically generated peptide
  VARIANT (1)..(17): Xaa = Any Amino Acid
ACEFCAXNPACTXGXXC

SEQ ID NO: 11031 - protein, 15 aa, Artificial Sequence
  Synthetically generated peptide
  VARIANT (1)..(15): Xaa = Any Amino Acid
ACEFCAXNPACTGXC

SEQ ID NO: 11032 - protein, 16 aa, Artificial Sequence
  Synthetically generated peptide
  VARIANT (1)..(16): Xaa = Any Amino Acid
ACEFCAXNPACTGXXC

SEQ ID NO: 11033 - protein, 17 aa, Artificial Sequence
  Synthetically generated peptide
  VARIANT (1)..(17): Xaa = Any Amino Acid
ACEFCAXNPACTGXXXC

SEQ ID NO: 11034 - protein, 14 aa, Artificial Sequence
  Synthetically generated peptide
  VARIANT (1)..(14): Xaa = Any Amino Acid
ACEFCANXPACTGC

SEQ ID NO: 11035 - protein, 15 aa, Artificial Sequence
  Synthetically generated peptide
  VARIANT (1)..(15): Xaa = Any Amino Acid
ACEFCANXXPACTGC

SEQ ID NO: 11036 - protein, 16 aa, Artificial Sequence
  Synthetically generated peptide
  VARIANT (1)..(16): Xaa = Any Amino Acid
ACEFCANXXXPACTGC

SEQ ID NO: 11037 - protein, 17 aa, Artificial Sequence
  Synthetically generated peptide
  VARIANT (1)..(17): Xaa = Any Amino Acid
ACEFCANXXXXPACTGC

SEQ ID NO: 11038 - protein, 17 aa, Artificial Sequence
  Synthetically generated peptide
  VARIANT (1)..(17): Xaa = Any Amino Acid
ACEFCANXXXPXACTGC

SEQ ID NO: 11039 - protein, 17 aa, Artificial Sequence
  Synthetically generated peptide
  VARIANT (1)..(17): Xaa = Any Amino Acid
ACEFCANXXXPAXCTGC

SEQ ID NO: 11040 - protein, 17 aa, Artificial Sequence
  Synthetically generated peptide
  VARIANT (1)..(17): Xaa = Any Amino Acid
ACEFCANXXXPACXTGC

SEQ ID NO: 11041 - protein, 17 aa, Artificial Sequence
  Synthetically generated peptide
  VARIANT (1)..(17): Xaa = Any Amino Acid
ACEFCANXXXPACTXGC

SEQ ID NO: 11042 - protein, 17 aa, Artificial Sequence
  Synthetically generated peptide
  VARIANT (1)..(17): Xaa = Any Amino Acid
ACEFCANXXXPACTGXC

SEQ ID NO: 11043 - protein, 16 aa, Artificial Sequence
  Synthetically generated peptide
  VARIANT (1)..(16): Xaa = Any Amino Acid
ACEFCANXXPXACTGC

SEQ ID NO: 11044 - protein, 17 aa, Artificial Sequence
  Synthetically generated peptide
  VARIANT (1)..(17): Xaa = Any Amino Acid
ACEFCANXXPXXACTGC

SEQ ID NO: 11045 - protein, 17 aa, Artificial Sequence
  Synthetically generated peptide
  VARIANT (1)..(17): Xaa = Any Amino Acid
ACEFCANXXPXAXCTGC

SEQ ID NO: 11046 - protein, 17 aa, Artificial Sequence
  Synthetically generated peptide
  VARIANT (1)..(17): Xaa = Any Amino Acid
ACEFCANXXPXACXTGC

SEQ ID NO: 11047 - protein, 17 aa, Artificial Sequence
  Synthetically generated peptide
  VARIANT (1)..(17): Xaa = Any Amino Acid
ACEFCANXXPXACTXGC

SEQ ID NO: 11048 - protein, 17 aa, Artificial Sequence
  Synthetically generated peptide
  VARIANT (1)..(17): Xaa = Any Amino Acid
ACEFCANXXPXACTGXC

SEQ ID NO: 11049 - protein, 16 aa, Artificial Sequence
  Synthetically generated peptide
  VARIANT (1)..(16): Xaa = Any Amino Acid
ACEFCANXXPAXCTGC

SEQ ID NO: 11050 - protein, 17 aa, Artificial Sequence
  Synthetically generated peptide
  VARIANT (1)..(17): Xaa = Any Amino Acid
ACEFCANXXPAXXCTGC

SEQ ID NO: 11051 - protein, 17 aa, Artificial Sequence
  Synthetically generated peptide
  VARIANT (1)..(17): Xaa = Any Amino Acid
ACEFCANXXPAXCXTGC

SEQ ID NO: 11052 - protein, 17 aa, Artificial Sequence
  Synthetically generated peptide
  VARIANT (1)..(17): Xaa = Any Amino Acid
ACEFCANXXPAXCTXGC

SEQ ID NO: 11053 - protein, 17 aa, Artificial Sequence
  Synthetically generated peptide
  VARIANT (1)..(17): Xaa = Any Amino Acid
ACEFCANXXPAXCTGXC

SEQ ID NO: 11054 - protein, 16 aa, Artificial Sequence
  Synthetically generated peptide
  VARIANT (1)..(16): Xaa = Any Amino Acid
ACEFCANXXPACXTGC

SEQ ID NO: 11055 - protein, 17 aa, Artificial Sequence
  Synthetically generated peptide
  VARIANT (1)..(17): Xaa = Any Amino Acid
ACEFCANXXPACXXTGC

SEQ ID NO: 11056 - protein, 17 aa, Artificial Sequence
  Synthetically generated peptide
  VARIANT (1)..(17): Xaa = Any Amino Acid
ACEFCANXXPACXTXGC

SEQ ID NO: 11057 - protein, 17 aa, Artificial Sequence
  Synthetically generated peptide
  VARIANT (1)..(17): Xaa = Any Amino Acid
ACEFCANXXPACXTGXC

SEQ ID NO: 11058 - protein, 16 aa, Artificial Sequence
  Synthetically generated peptide
  VARIANT (1)..(16): Xaa = Any Amino Acid
ACEFCANXXPACTXGC

SEQ ID NO: 11059 - protein, 17 aa, Artificial Sequence
  Synthetically generated peptide
  VARIANT (1)..(17): Xaa = Any Amino Acid
ACEFCANXXPACTXXGC

SEQ ID NO: 11060 - protein, 17 aa, Artificial Sequence
  Synthetically generated peptide
  VARIANT (1)..(17): Xaa = Any Amino Acid
ACEFCANXXPACTXGXC

SEQ ID NO: 11061 - protein, 16 aa, Artificial Sequence
  Synthetically generated peptide
  VARIANT (1)..(16): Xaa = Any Amino Acid
ACEFCANXXPACTGXC

SEQ ID NO: 11062 - protein, 17 aa, Artificial Sequence
  Synthetically generated peptide
  VARIANT (1)..(17): Xaa = Any Amino Acid
ACEFCANXXPACTGXXC

SEQ ID NO: 11063 - protein, 15 aa, Artificial Sequence
  Synthetically generated peptide
  VARIANT (1)..(15): Xaa = Any Amino Acid
ACEFCANXPXACTGC

SEQ ID NO: 11064 - protein, 16 aa, Artificial Sequence
  Synthetically generated peptide
  VARIANT (1)..(16): Xaa = Any Amino Acid
ACEFCANXPXXACTGC

SEQ ID NO: 11065 - protein, 17 aa, Artificial Sequence
  Synthetically generated peptide
  VARIANT (1)..(17): Xaa = Any Amino Acid
ACEFCANXPXXXACTGC

SEQ ID NO: 11066 - protein, 17 aa, Artificial Sequence
  Synthetically generated peptide
  VARIANT (1)..(17): Xaa = Any Amino Acid
ACEFCANXPXXAXCTGC

SEQ ID NO: 11067 - protein, 17 aa, Artificial Sequence
  Synthetically generated peptide
  VARIANT (1)..(17): Xaa = Any Amino Acid
ACEFCANXPXXACXTGC

SEQ ID NO: 11068 - protein, 17 aa, Artificial Sequence
  Synthetically generated peptide
  VARIANT (1)..(17): Xaa = Any Amino Acid
ACEFCANXPXXACTXGC

SEQ ID NO: 11069 - protein, 17 aa, Artificial Sequence
  Synthetically generated peptide
  VARIANT (1)..(17): Xaa = Any Amino Acid
ACEFCANXPXXACTGXC

SEQ ID NO: 11070 - protein, 16 aa, Artificial Sequence
  Synthetically generated peptide
  VARIANT (1)..(16): Xaa = Any Amino Acid
ACEFCANXPXAXCTGC

SEQ ID NO: 11071 - protein, 17 aa, Artificial Sequence
  Synthetically generated peptide
  VARIANT (1)..(17): Xaa = Any Amino Acid
ACEFCANXPXAXXCTGC

SEQ ID NO: 11072 - protein, 17 aa, Artificial Sequence
  Synthetically generated peptide
  VARIANT (1)..(17): Xaa = Any Amino Acid
ACEFCANXPXAXCXTGC

SEQ ID NO: 11073 - protein, 17 aa, Artificial Sequence
  Synthetically generated peptide
  VARIANT (1)..(17): Xaa = Any Amino Acid
ACEFCANXPXAXCTXGC

SEQ ID NO: 11074 - protein, 17 aa, Artificial Sequence
  Synthetically generated peptide
  VARIANT (1)..(17): Xaa = Any Amino Acid
ACEFCANXPXAXCTGXC

SEQ ID NO: 11075 - protein, 16 aa, Artificial Sequence
  Synthetically generated peptide
  VARIANT (1)..(16): Xaa = Any Amino Acid
ACEFCANXPXACXTGC

SEQ ID NO: 11076 - protein, 17 aa, Artificial Sequence
  Synthetically generated peptide
  VARIANT (1)..(17): Xaa = Any Amino Acid
ACEFCANXPXACXXTGC

SEQ ID NO: 11077 - protein, 17 aa, Artificial Sequence
  Synthetically generated peptide
  VARIANT (1)..(17): Xaa = Any Amino Acid
ACEFCANXPXACXTXGC

SEQ ID NO: 11078 - protein, 17 aa, Artificial Sequence
  Synthetically generated peptide
  VARIANT (1)..(17): Xaa = Any Amino Acid
ACEFCANXPXACXTGXC

SEQ ID NO: 11079 - protein, 16 aa, Artificial Sequence
  Synthetically generated peptide
  VARIANT (1)..(16): Xaa = Any Amino Acid
ACEFCANXPXACTXGC

SEQ ID NO: 11080 - protein, 17 aa, Artificial Sequence
  Synthetically generated peptide
  VARIANT (1)..(17): Xaa = Any Amino Acid
ACEFCANXPXACTXXGC

SEQ ID NO: 11081 - protein, 17 aa, Artificial Sequence
  Synthetically generated peptide
  VARIANT (1)..(17): Xaa = Any Amino Acid
ACEFCANXPXACTXGXC

SEQ ID NO: 11082 - protein, 16 aa, Artificial Sequence
  Synthetically generated peptide
  VARIANT (1)..(16): Xaa = Any Amino Acid
ACEFCANXPXACTGXC

SEQ ID NO: 11083 - protein, 17 aa, Artificial Sequence
  Synthetically generated peptide
  VARIANT (1)..(17): Xaa = Any Amino Acid
ACEFCANXPXACTGXXC

SEQ ID NO: 11084 - protein, 15 aa, Artificial Sequence
  Synthetically generated peptide
  VARIANT (1)..(15): Xaa = Any Amino Acid
ACEFCANXPAXCTGC

SEQ ID NO: 11085 - protein, 16 aa, Artificial Sequence
  Synthetically generated peptide
  VARIANT (1)..(16): Xaa = Any Amino Acid
ACEFCANXPAXXCTGC

SEQ ID NO: 11086 - protein, 17 aa, Artificial Sequence
  Synthetically generated peptide
  VARIANT (1)..(17): Xaa = Any Amino Acid
ACEFCANXPAXXXCTGC

SEQ ID NO: 11087 - protein, 17 aa, Artificial Sequence
  Synthetically generated peptide
  VARIANT (1)..(17): Xaa = Any Amino Acid
ACEFCANXPAXXCXTGC

SEQ ID NO: 11088 - protein, 17 aa, Artificial Sequence
  Synthetically generated peptide
  VARIANT (1)..(17): Xaa = Any Amino Acid
ACEFCANXPAXXCTXGC

SEQ ID NO: 11089 - protein, 17 aa, Artificial Sequence
  Synthetically generated peptide
  VARIANT (1)..(17): Xaa = Any Amino Acid
ACEFCANXPAXXCTGXC

SEQ ID NO: 11090 - protein, 16 aa, Artificial Sequence
  Synthetically generated peptide
  VARIANT (1)..(16): Xaa = Any Amino Acid
ACEFCANXPAXCXTGC

SEQ ID NO: 11091 - protein, 17 aa, Artificial Sequence
  Synthetically generated peptide
  VARIANT (1)..(17): Xaa = Any Amino Acid
ACEFCANXPAXCXXTGC

SEQ ID NO: 11092 - protein, 17 aa, Artificial Sequence
  Synthetically generated peptide
  VARIANT (1)..(17): Xaa = Any Amino Acid
ACEFCANXPAXCXTXGC

SEQ ID NO: 11093 - protein, 17 aa, Artificial Sequence
  Synthetically generated peptide
  VARIANT (1)..(17): Xaa = Any Amino Acid
ACEFCANXPAXCXTGXC

SEQ ID NO: 11094 - protein, 16 aa, Artificial Sequence
  Synthetically generated peptide
  VARIANT (1)..(16): Xaa = Any Amino Acid
ACEFCANXPAXCTXGC

SEQ ID NO: 11095 - protein, 17 aa, Artificial Sequence
  Synthetically generated peptide
  VARIANT (1)..(17): Xaa = Any Amino Acid
ACEFCANXPAXCTXXGC

SEQ ID NO: 11096 - protein, 17 aa, Artificial Sequence
  Synthetically generated peptide
  VARIANT (1)..(17): Xaa = Any Amino Acid
ACEFCANXPAXCTXGXC

SEQ ID NO: 11097 - protein, 16 aa, Artificial Sequence
  Synthetically generated peptide
  VARIANT (1)..(16): Xaa = Any Amino Acid
ACEFCANXPAXCTGXC

SEQ ID NO: 11098 - protein, 17 aa, Artificial Sequence
  Synthetically generated peptide
  VARIANT (1)..(17): Xaa = Any Amino Acid
ACEFCANXPAXCTGXXC

SEQ ID NO: 11099 - protein, 15 aa, Artificial Sequence
  Synthetically generated peptide
  VARIANT (1)..(15): Xaa = Any Amino Acid
ACEFCANXPACXTGC

SEQ ID NO: 11100 - protein, 16 aa, Artificial Sequence
  Synthetically generated peptide
  VARIANT (1)..(16): Xaa = Any Amino Acid
ACEFCANXPACXXTGC

SEQ ID NO: 11101 - protein, 17 aa, Artificial Sequence
  Synthetically generated peptide
  VARIANT (1)..(17): Xaa = Any Amino Acid
ACEFCANXPACXXXTGC

SEQ ID NO: 11102 - protein, 17 aa, Artificial Sequence
  Synthetically generated peptide
  VARIANT (1)..(17): Xaa = Any Amino Acid
ACEFCANXPACXXTXGC

SEQ ID NO: 11103 - protein, 17 aa, Artificial Sequence
  Synthetically generated peptide
  VARIANT (1)..(17): Xaa = Any Amino Acid
ACEFCANXPACXXTGXC

SEQ ID NO: 11104 - protein, 16 aa, Artificial Sequence
  Synthetically generated peptide
  VARIANT (1)..(16): Xaa = Any Amino Acid
ACEFCANXPACXTXGC

SEQ ID NO: 11105 - protein, 17 aa, Artificial Sequence
  Synthetically generated peptide
  VARIANT (1)..(17): Xaa = Any Amino Acid
ACEFCANXPACXTXXGC

SEQ ID NO: 11106 - protein, 17 aa, Artificial Sequence
  Synthetically generated peptide
  VARIANT (1)..(17): Xaa = Any Amino Acid
ACEFCANXPACXTXGXC

SEQ ID NO: 11107 - protein, 16 aa, Artificial Sequence
  Synthetically generated peptide
  VARIANT (1)..(16): Xaa = Any Amino Acid
ACEFCANXPACXTGXC

SEQ ID NO: 11108 - protein, 17 aa, Artificial Sequence
  Synthetically generated peptide
  VARIANT (1)..(17): Xaa = Any Amino Acid
ACEFCANXPACXTGXXC

SEQ ID NO: 11109 - protein, 15 aa, Artificial Sequence
  Synthetically generated peptide
  VARIANT (1)..(15): Xaa = Any Amino Acid
ACEFCANXPACTXGC

SEQ ID NO: 11110 - protein, 16 aa, Artificial Sequence
  Synthetically generated peptide
  VARIANT (1)..(16): Xaa = Any Amino Acid
ACEFCANXPACTXXGC

SEQ ID NO: 11111 - protein, 17 aa, Artificial Sequence
  Synthetically generated peptide
  VARIANT (1)..(17): Xaa = Any Amino Acid
ACEFCANXPACTXXXGC

SEQ ID NO: 11112 - protein, 17 aa, Artificial Sequence
  Synthetically generated peptide
  VARIANT (1)..(17): Xaa = Any Amino Acid
ACEFCANXPACTXXGXC

SEQ ID NO: 11113 - protein, 16 aa, Artificial Sequence
  Synthetically generated peptide
  VARIANT (1)..(16): Xaa = Any Amino Acid
ACEFCANXPACTXGXC

SEQ ID NO: 11114 - protein, 17 aa, Artificial Sequence
  Synthetically generated peptide
  VARIANT (1)..(17): Xaa = Any Amino Acid
ACEFCANXPACTXGXXC

SEQ ID NO: 11115 - protein, 15 aa, Artificial Sequence
  Synthetically generated peptide
  VARIANT (1)..(15): Xaa = Any Amino Acid
ACEFCANXPACTGXC

SEQ ID NO: 11116 - protein, 16 aa, Artificial Sequence
  Synthetically generated peptide
  VARIANT (1)..(16): Xaa = Any Amino Acid
ACEFCANXPACTGXXC

SEQ ID NO: 11117 - protein, 17 aa, Artificial Sequence
  Synthetically generated peptide
  VARIANT (1)..(17): Xaa = Any Amino Acid
ACEFCANXPACTGXXXC

SEQ ID NO: 11118 - protein, 14 aa, Artificial Sequence
  Synthetically generated peptide
  VARIANT (1)..(14): Xaa = Any Amino Acid
ACEFCANPXACTGC

SEQ ID NO: 11119 - protein, 15 aa, Artificial Sequence
  Synthetically generated peptide
  VARIANT (1)..(15): Xaa = Any Amino Acid
ACEFCANPXXACTGC

SEQ ID NO: 11120 - protein, 16 aa, Artificial Sequence
  Synthetically generated peptide
  VARIANT (1)..(16): Xaa = Any Amino Acid
ACEFCANPXXXACTGC

SEQ ID NO: 11121 - protein, 17 aa, Artificial Sequence
  Synthetically generated peptide
  VARIANT (1)..(17): Xaa = Any Amino Acid
ACEFCANPXXXXACTGC

SEQ ID NO: 11122 - protein, 17 aa, Artificial Sequence
  Synthetically generated peptide
  VARIANT (1)..(17): Xaa = Any Amino Acid
ACEFCANPXXXAXCTGC

SEQ ID NO: 11123 - protein, 17 aa, Artificial Sequence
  Synthetically generated peptide
  VARIANT (1)..(17): Xaa = Any Amino Acid
ACEFCANPXXXACXTGC

SEQ ID NO: 11124 - protein, 17 aa, Artificial Sequence
  Synthetically generated peptide
  VARIANT (1)..(17): Xaa = Any Amino Acid
ACEFCANPXXXACTXGC

SEQ ID NO: 11125 - protein, 17 aa, Artificial Sequence
  Synthetically generated peptide
  VARIANT (1)..(17): Xaa = Any Amino Acid
ACEFCANPXXXACTGXC

SEQ ID NO: 11126 - protein, 16 aa, Artificial Sequence
  Synthetically generated peptide
  VARIANT (1)..(16): Xaa = Any Amino Acid
ACEFCANPXXAXCTGC

SEQ ID NO: 11127 - protein, 17 aa, Artificial Sequence
  Synthetically generated peptide
  VARIANT (1)..(17): Xaa = Any Amino Acid
ACEFCANPXXAXXCTGC

SEQ ID NO: 11128 - protein, 17 aa, Artificial Sequence
  Synthetically generated peptide
  VARIANT (1)..(17): Xaa = Any Amino Acid
ACEFCANPXXAXCXTGC

SEQ ID NO: 11129 - protein, 17 aa, Artificial Sequence
  Synthetically generated peptide
  VARIANT (1)..(17): Xaa = Any Amino Acid
ACEFCANPXXAXCTXGC

SEQ ID NO: 11130 - protein, 17 aa, Artificial Sequence
  Synthetically generated peptide
  VARIANT (1)..(17): Xaa = Any Amino Acid
ACEFCANPXXAXCTGXC

SEQ ID NO: 11131 - protein, 16 aa, Artificial Sequence
  Synthetically generated peptide
  VARIANT (1)..(16): Xaa = Any Amino Acid
ACEFCANPXXACXTGC

SEQ ID NO: 11132 - protein, 17 aa, Artificial Sequence
  Synthetically generated peptide
  VARIANT (1)..(17): Xaa = Any Amino Acid
ACEFCANPXXACXXTGC

SEQ ID NO: 11133 - protein, 17 aa, Artificial Sequence
  Synthetically generated peptide
  VARIANT (1)..(17): Xaa = Any Amino Acid
ACEFCANPXXACXTXGC

SEQ ID NO: 11134 - protein, 17 aa, Artificial Sequence
  Synthetically generated peptide
  VARIANT (1)..(17): Xaa = Any Amino Acid
ACEFCANPXXACXTGXC

SEQ ID NO: 11135 - protein, 16 aa, Artificial Sequence
  Synthetically generated peptide
  VARIANT (1)..(16): Xaa = Any Amino Acid
ACEFCANPXXACTXGC

SEQ ID NO: 11136 - protein, 17 aa, Artificial Sequence
  Synthetically generated peptide
  VARIANT (1)..(17): Xaa = Any Amino Acid
ACEFCANPXXACTXXGC

SEQ ID NO: 11137 - protein, 17 aa, Artificial Sequence
  Synthetically generated peptide
  VARIANT (1)..(17): Xaa = Any Amino Acid
ACEFCANPXXACTXGXC

SEQ ID NO: 11138 - protein, 16 aa, Artificial Sequence
  Synthetically generated peptide
  VARIANT (1)..(16): Xaa = Any Amino Acid
ACEFCANPXXACTGXC

SEQ ID NO: 11139 - protein, 17 aa, Artificial Sequence
  Synthetically generated peptide
  VARIANT (1)..(17): Xaa = Any Amino Acid
ACEFCANPXXACTGXXC

SEQ ID NO: 11140 - protein, 15 aa, Artificial Sequence
  Synthetically generated peptide
  VARIANT (1)..(15): Xaa = Any Amino Acid
ACEFCANPXAXCTGC

SEQ ID NO: 11141 - protein, 16 aa, Artificial Sequence
  Synthetically generated peptide
  VARIANT (1)..(16): Xaa = Any Amino Acid
ACEFCANPXAXXCTGC

SEQ ID NO: 11142 - protein, 17 aa, Artificial Sequence
  Synthetically generated peptide
  VARIANT (1)..(17): Xaa = Any Amino Acid
ACEFCANPXAXXXCTGC

SEQ ID NO: 11143 - protein, 17 aa, Artificial Sequence
  Synthetically generated peptide
  VARIANT (1)..(17): Xaa = Any Amino Acid
ACEFCANPXAXXCXTGC

SEQ ID NO: 11144 - protein, 17 aa, Artificial Sequence
  Synthetically generated peptide
  VARIANT (1)..(17): Xaa = Any Amino Acid
ACEFCANPXAXXCTXGC

SEQ ID NO: 11145 - protein, 17 aa, Artificial Sequence
  Synthetically generated peptide
  VARIANT (1)..(17): Xaa = Any Amino Acid
ACEFCANPXAXXCTGXC

SEQ ID NO: 11146 - protein, 16 aa, Artificial Sequence
  Synthetically generated peptide
  VARIANT (1)..(16): Xaa = Any Amino Acid
ACEFCANPXAXCXTGC

SEQ ID NO: 11147 - protein, 17 aa, Artificial Sequence
  Synthetically generated peptide
  VARIANT (1)..(17): Xaa = Any Amino Acid
ACEFCANPXAXCXXTGC

SEQ ID NO: 11148 - protein, 17 aa, Artificial Sequence
  Synthetically generated peptide
  VARIANT (1)..(17): Xaa = Any Amino Acid
ACEFCANPXAXCXTXGC

SEQ ID NO: 11149 - protein, 17 aa, Artificial Sequence
  Synthetically generated peptide
  VARIANT (1)..(17): Xaa = Any Amino Acid
ACEFCANPXAXCXTGXC

SEQ ID NO: 11150 - protein, 16 aa, Artificial Sequence
  Synthetically generated peptide
  VARIANT (1)..(16): Xaa = Any Amino Acid
ACEFCANPXAXCTXGC

SEQ ID NO: 11151 - protein, 17 aa, Artificial Sequence
  Synthetically generated peptide
  VARIANT (1)..(17): Xaa = Any Amino Acid
ACEFCANPXAXCTXXGC

SEQ ID NO: 11152 - protein, 17 aa, Artificial Sequence
  Synthetically generated peptide
  VARIANT (1)..(17): Xaa = Any Amino Acid
ACEFCANPXAXCTXGXC

SEQ ID NO: 11153 - protein, 16 aa, Artificial Sequence
  Synthetically generated peptide
  VARIANT (1)..(16): Xaa = Any Amino Acid
ACEFCANPXAXCTGXC

SEQ ID NO: 11154 - protein, 17 aa, Artificial Sequence
  Synthetically generated peptide
  VARIANT (1)..(17): Xaa = Any Amino Acid
ACEFCANPXAXCTGXXC

SEQ ID NO: 11155 - protein, 15 aa, Artificial Sequence
  Synthetically generated peptide
  VARIANT (1)..(15): Xaa = Any Amino Acid
ACEFCANPXACXTGC

SEQ ID NO: 11156 - protein, 16 aa, Artificial Sequence
  Synthetically generated peptide
  VARIANT (1)..(16): Xaa = Any Amino Acid
ACEFCANPXACXXTGC

SEQ ID NO: 11157 - protein, 17 aa, Artificial Sequence
  Synthetically generated peptide
  VARIANT (1)..(17): Xaa = Any Amino Acid
ACEFCANPXACXXXTGC

SEQ ID NO: 11158 - protein, 17 aa, Artificial Sequence
  Synthetically generated peptide
  VARIANT (1)..(17): Xaa = Any Amino Acid
ACEFCANPXACXXTXGC

SEQ ID NO: 11159 - protein, 17 aa, Artificial Sequence
  Synthetically generated peptide
  VARIANT (1)..(17): Xaa = Any Amino Acid
ACEFCANPXACXXTGXC

SEQ ID NO: 11160 - protein, 16 aa, Artificial Sequence
  Synthetically generated peptide
  VARIANT (1)..(16): Xaa = Any Amino Acid
ACEFCANPXACXTXGC

SEQ ID NO: 11161 - protein, 17 aa, Artificial Sequence
  Synthetically generated peptide
  VARIANT (1)..(17): Xaa = Any Amino Acid
ACEFCANPXACXTXXGC

SEQ ID NO: 11162 - protein, 17 aa, Artificial Sequence
  Synthetically generated peptide
  VARIANT (1)..(17): Xaa = Any Amino Acid
ACEFCANPXACXTXGXC

SEQ ID NO: 11163 - protein, 16 aa, Artificial Sequence
  Synthetically generated peptide
  VARIANT (1)..(16): Xaa = Any Amino Acid
ACEFCANPXACXTGXC

SEQ ID NO: 11164 - protein, 17 aa, Artificial Sequence
  Synthetically generated peptide
  VARIANT (1)..(17): Xaa = Any Amino Acid
ACEFCANPXACXTGXXC

SEQ ID NO: 11165 - protein, 15 aa, Artificial Sequence
  Synthetically generated peptide
  VARIANT (1)..(15): Xaa = Any Amino Acid
ACEFCANPXACTXGC

SEQ ID NO: 11166 - protein, 16 aa, Artificial Sequence
  Synthetically generated peptide
  VARIANT (1)..(16): Xaa = Any Amino Acid
ACEFCANPXACTXXGC

SEQ ID NO: 11167 - protein, 17 aa, Artificial Sequence
  Synthetically generated peptide
  VARIANT (1)..(17): Xaa = Any Amino Acid
ACEFCANPXACTXXXGC

SEQ ID NO: 11168 - protein, 17 aa, Artificial Sequence
  Synthetically generated peptide
  VARIANT (1)..(17): Xaa = Any Amino Acid
ACEFCANPXACTXXGXC

SEQ ID NO: 11169 - protein, 16 aa, Artificial Sequence
  Synthetically generated peptide
  VARIANT (1)..(16): Xaa = Any Amino Acid
ACEFCANPXACTXGXC

SEQ ID NO: 11170 - protein, 17 aa, Artificial Sequence
  Synthetically generated peptide
  VARIANT (1)..(17): Xaa = Any Amino Acid
ACEFCANPXACTXGXXC

SEQ ID NO: 11171 - protein, 15 aa, Artificial Sequence
  Synthetically generated peptide
  VARIANT (1)..(15): Xaa = Any Amino Acid
ACEFCANPXACTGXC

SEQ ID NO: 11172 - protein, 16 aa, Artificial Sequence
  Synthetically generated peptide
  VARIANT (1)..(16): Xaa = Any Amino Acid
ACEFCANPXACTGXXC

SEQ ID NO: 11173 - protein, 17 aa, Artificial Sequence
  Synthetically generated peptide
  VARIANT (1)..(17): Xaa = Any Amino Acid
ACEFCANPXACTGXXXC

SEQ ID NO: 11174 - protein, 14 aa, Artificial Sequence
  Synthetically generated peptide
  VARIANT (1)..(14): Xaa = Any Amino Acid
ACEFCANPAXCTGC

SEQ ID NO: 11175 - protein, 15 aa, Artificial Sequence
  Synthetically generated peptide
  VARIANT (1)..(15): Xaa = Any Amino Acid
ACEFCANPAXXCTGC

SEQ ID NO: 11176 - protein, 16 aa, Artificial Sequence
  Synthetically generated peptide
  VARIANT (1)..(16): Xaa = Any Amino Acid
ACEFCANPAXXXCTGC

SEQ ID NO: 11177 - protein, 17 aa, Artificial Sequence
  Synthetically generated peptide
  VARIANT (1)..(17): Xaa = Any Amino Acid
ACEFCANPAXXXXCTGC

SEQ ID NO: 11178 - protein, 17 aa, Artificial Sequence
  Synthetically generated peptide
  VARIANT (1)..(17): Xaa = Any Amino Acid
ACEFCANPAXXXCXTGC

SEQ ID NO: 11179 - protein, 17 aa, Artificial Sequence
  Synthetically generated peptide
  VARIANT (1)..(17): Xaa = Any Amino Acid
ACEFCANPAXXXCTXGC

SEQ ID NO: 11180 - protein, 17 aa, Artificial Sequence
  Synthetically generated peptide
  VARIANT (1)..(17): Xaa = Any Amino Acid
ACEFCANPAXXXCTGXC

SEQ ID NO: 11181 - protein, 16 aa, Artificial Sequence
  Synthetically generated peptide
  VARIANT (1)..(16): Xaa = Any Amino Acid
ACEFCANPAXXCXTGC

SEQ ID NO: 11182 - protein, 17 aa, Artificial Sequence
  Synthetically generated peptide
  VARIANT (1)..(17): Xaa = Any Amino Acid
ACEFCANPAXXCXXTGC

SEQ ID NO: 11183 - protein, 17 aa, Artificial Sequence
  Synthetically generated peptide
  VARIANT (1)..(17): Xaa = Any Amino Acid
ACEFCANPAXXCXTXGC

SEQ ID NO: 11184 - protein, 17 aa, Artificial Sequence
  Synthetically generated peptide
  VARIANT (1)..(17): Xaa = Any Amino Acid
ACEFCANPAXXCXTGXC

SEQ ID NO: 11185 - protein, 16 aa, Artificial Sequence
  Synthetically generated peptide
  VARIANT (1)..(16): Xaa = Any Amino Acid
ACEFCANPAXXCTXGC

SEQ ID NO: 11186 - protein, 17 aa, Artificial Sequence
  Synthetically generated peptide
  VARIANT (1)..(17): Xaa = Any Amino Acid
ACEFCANPAXXCTXXGC

SEQ ID NO: 11187 - protein, 17 aa, Artificial Sequence
  Synthetically generated peptide
  VARIANT (1)..(17): Xaa = Any Amino Acid
ACEFCANPAXXCTXGXC

SEQ ID NO: 11188 - protein, 16 aa, Artificial Sequence
  Synthetically generated peptide
  VARIANT (1)..(16): Xaa = Any Amino Acid
ACEFCANPAXXCTGXC

SEQ ID NO: 11189 - protein, 17 aa, Artificial Sequence
  Synthetically generated peptide
  VARIANT (1)..(17): Xaa = Any Amino Acid
ACEFCANPAXXCTGXXC

SEQ ID NO: 11190 - protein, 15 aa, Artificial Sequence
  Synthetically generated peptide
  VARIANT (1)..(15): Xaa = Any Amino Acid
ACEFCANPAXCXTGC

SEQ ID NO: 11191 - protein, 16 aa, Artificial Sequence
  Synthetically generated peptide
  VARIANT (1)..(16): Xaa = Any Amino Acid
ACEFCANPAXCXXTGC

SEQ ID NO: 11192 - protein, 17 aa, Artificial Sequence
  Synthetically generated peptide
  VARIANT (1)..(17): Xaa = Any Amino Acid
ACEFCANPAXCXXXTGC

SEQ ID NO: 11193 - protein, 17 aa, Artificial Sequence
  Synthetically generated peptide
  VARIANT (1)..(17): Xaa = Any Amino Acid
ACEFCANPAXCXXTXGC

SEQ ID NO: 11194 - protein, 17 aa, Artificial Sequence
  Synthetically generated peptide
  VARIANT (1)..(17): Xaa = Any Amino Acid
ACEFCANPAXCXXTGXC

SEQ ID NO: 11195 - protein, 16 aa, Artificial Sequence
  Synthetically generated peptide
  VARIANT (1)..(16): Xaa = Any Amino Acid
ACEFCANPAXCXTXGC

SEQ ID NO: 11196 - protein, 17 aa, Artificial Sequence
  Synthetically generated peptide
  VARIANT (1)..(17): Xaa = Any Amino Acid
ACEFCANPAXCXTXXGC

SEQ ID NO: 11197 - protein, 17 aa, Artificial Sequence
  Synthetically generated peptide
  VARIANT (1)..(17): Xaa = Any Amino Acid
ACEFCANPAXCXTXGXC

SEQ ID NO: 11198 - protein, 16 aa, Artificial Sequence
  Synthetically generated peptide
  VARIANT (1)..(16): Xaa = Any Amino Acid
ACEFCANPAXCXTGXC

SEQ ID NO: 11199 - protein, 17 aa, Artificial Sequence
  Synthetically generated peptide
  VARIANT (1)..(17): Xaa = Any Amino Acid
ACEFCANPAXCXTGXXC

SEQ ID NO: 11200 - protein, 15 aa, Artificial Sequence
  Synthetically generated peptide
  VARIANT (1)..(15): Xaa = Any Amino Acid
ACEFCANPAXCTXGC

SEQ ID NO: 11201 - protein, 16 aa, Artificial Sequence
  Synthetically generated peptide
  VARIANT (1)..(16): Xaa = Any Amino Acid
ACEFCANPAXCTXXGC

SEQ ID NO: 11202 - protein, 17 aa, Artificial Sequence
  Synthetically generated peptide
  VARIANT (1)..(17): Xaa = Any Amino Acid
ACEFCANPAXCTXXXGC

SEQ ID NO: 11203 - protein, 17 aa, Artificial Sequence
  Synthetically generated peptide
  VARIANT (1)..(17): Xaa = Any Amino Acid
ACEFCANPAXCTXXGXC

SEQ ID NO: 11204 - protein, 16 aa, Artificial Sequence
  Synthetically generated peptide
  VARIANT (1)..(16): Xaa = Any Amino Acid
ACEFCANPAXCTXGXC

SEQ ID NO: 11205 - protein, 17 aa, Artificial Sequence
  Synthetically generated peptide
  VARIANT (1)..(17): Xaa = Any Amino Acid
ACEFCANPAXCTXGXXC

SEQ ID NO: 11206 - protein, 15 aa, Artificial Sequence
  Synthetically generated peptide
  VARIANT (1)..(15): Xaa = Any Amino Acid
ACEFCANPAXCTGXC

SEQ ID NO: 11207 - protein, 16 aa, Artificial Sequence
  Synthetically generated peptide
  VARIANT (1)..(16): Xaa = Any Amino Acid
ACEFCANPAXCTGXXC

SEQ ID NO: 11208 - protein, 17 aa, Artificial Sequence
  Synthetically generated peptide
  VARIANT (1)..(17): Xaa = Any Amino Acid
ACEFCANPAXCTGXXXC

SEQ ID NO: 11209 - protein, 14 aa, Artificial Sequence
  Synthetically generated peptide
  VARIANT (1)..(14): Xaa = Any Amino Acid
ACEFCANPACXTGC

SEQ ID NO: 11210 - protein, 15 aa, Artificial Sequence
  Synthetically generated peptide
  VARIANT (1)..(15): Xaa = Any Amino Acid
ACEFCANPACXXTGC

SEQ ID NO: 11211 - protein, 16 aa, Artificial Sequence
  Synthetically generated peptide
  VARIANT (1)..(16): Xaa = Any Amino Acid
ACEFCANPACXXXTGC

SEQ ID NO: 11212 - protein, 17 aa, Artificial Sequence
  Synthetically generated peptide
  VARIANT (1)..(17): Xaa = Any Amino Acid
ACEFCANPACXXXXTGC

SEQ ID NO: 11213 - protein, 17 aa, Artificial Sequence
  Synthetically generated peptide
  VARIANT (1)..(17): Xaa = Any Amino Acid
ACEFCANPACXXXTXGC

SEQ ID NO: 11214 - protein, 17 aa, Artificial Sequence
  Synthetically generated peptide
  VARIANT (1)..(17): Xaa = Any Amino Acid
ACEFCANPACXXXTGXC

SEQ ID NO: 11215 - protein, 16 aa, Artificial Sequence
  Synthetically generated peptide
  VARIANT (1)..(16): Xaa = Any Amino Acid
ACEFCANPACXXTXGC

SEQ ID NO: 11216 - protein, 17 aa, Artificial Sequence
  Synthetically generated peptide
  VARIANT (1)..(17): Xaa = Any Amino Acid
ACEFCANPACXXTXXGC

SEQ ID NO: 11217 - protein, 17 aa, Artificial Sequence
  Synthetically generated peptide
  VARIANT (1)..(17): Xaa = Any Amino Acid
ACEFCANPACXXTXGXC

SEQ ID NO: 11218 - protein, 16 aa, Artificial Sequence
  Synthetically generated peptide
  VARIANT (1)..(16): Xaa = Any Amino Acid
ACEFCANPACXXTGXC

SEQ ID NO: 11219 - protein, 17 aa, Artificial Sequence
  Synthetically generated peptide
  VARIANT (1)..(17): Xaa = Any Amino Acid
ACEFCANPACXXTGXXC

SEQ ID NO: 11220 - protein, 15 aa, Artificial Sequence
  Synthetically generated peptide
  VARIANT (1)..(15): Xaa = Any Amino Acid
ACEFCANPACXTXGC

SEQ ID NO: 11221 - protein, 16 aa, Artificial Sequence
  Synthetically generated peptide
  VARIANT (1)..(16): Xaa = Any Amino Acid
ACEFCANPACXTXXGC

SEQ ID NO: 11222 - protein, 17 aa, Artificial Sequence
  Synthetically generated peptide
  VARIANT (1)..(17): Xaa = Any Amino Acid
ACEFCANPACXTXXXGC

SEQ ID NO: 11223 - protein, 17 aa, Artificial Sequence
  Synthetically generated peptide
  VARIANT (1)..(17): Xaa = Any Amino Acid
ACEFCANPACXTXXGXC

SEQ ID NO: 11224 - protein, 16 aa, Artificial Sequence
  Synthetically generated peptide
  VARIANT (1)..(16): Xaa = Any Amino Acid
ACEFCANPACXTXGXC

SEQ ID NO: 11225 - protein, 17 aa, Artificial Sequence
  Synthetically generated peptide
  VARIANT (1)..(17): Xaa = Any Amino Acid
ACEFCANPACXTXGXXC

SEQ ID NO: 11226 - protein, 15 aa, Artificial Sequence
  Synthetically generated peptide
  VARIANT (1)..(15): Xaa = Any Amino Acid
ACEFCANPACXTGXC

SEQ ID NO: 11227 - protein, 16 aa, Artificial Sequence
  Synthetically generated peptide
  VARIANT (1)..(16): Xaa = Any Amino Acid
ACEFCANPACXTGXXC

SEQ ID NO: 11228 - protein, 17 aa, Artificial Sequence
  Synthetically generated peptide
  VARIANT (1)..(17): Xaa = Any Amino Acid
ACEFCANPACXTGXXXC

SEQ ID NO: 11229 - protein, 14 aa, Artificial Sequence
  Synthetically generated peptide
  VARIANT (1)..(14): Xaa = Any Amino Acid
ACEFCANPACTXGC

SEQ ID NO: 11230 - protein, 15 aa, Artificial Sequence
  Synthetically generated peptide
  VARIANT (1)..(15): Xaa = Any Amino Acid
ACEFCANPACTXXGC

SEQ ID NO: 11231 - protein, 16 aa, Artificial Sequence
  Synthetically generated peptide
  VARIANT (1)..(16): Xaa = Any Amino Acid
ACEFCANPACTXXXGC

SEQ ID NO: 11232 - protein, 17 aa, Artificial Sequence
  Synthetically generated peptide
  VARIANT (1)..(17): Xaa = Any Amino Acid
ACEFCANPACTXXXXGC

SEQ ID NO: 11233 - protein, 17 aa, Artificial Sequence
  Synthetically generated peptide
  VARIANT (1)..(17): Xaa = Any Amino Acid
ACEFCANPACTXXXGXC

SEQ ID NO: 11234 - protein, 16 aa, Artificial Sequence
  Synthetically generated peptide
  VARIANT (1)..(16): Xaa = Any Amino Acid
ACEFCANPACTXXGXC

SEQ ID NO: 11235 - protein, 17 aa, Artificial Sequence
  Synthetically generated peptide
  VARIANT (1)..(17): Xaa = Any Amino Acid
ACEFCANPACTXXGXXC

SEQ ID NO: 11236 - protein, 15 aa, Artificial Sequence
  Synthetically generated peptide
  VARIANT (1)..(15): Xaa = Any Amino Acid
ACEFCANPACTXGXC

SEQ ID NO: 11237 - protein, 16 aa, Artificial Sequence
  Synthetically generated peptide
  VARIANT (1)..(16): Xaa = Any Amino Acid
ACEFCANPACTXGXXC

SEQ ID NO: 11238 - protein, 17 aa, Artificial Sequence
  Synthetically generated peptide
  VARIANT (1)..(17): Xaa = Any Amino Acid
ACEFCANPACTXGXXXC

SEQ ID NO: 11239 - protein, 14 aa, Artificial Sequence
  Synthetically generated peptide
  VARIANT (1)..(14): Xaa = Any Amino Acid
ACEFCANPACTGXC

SEQ ID NO: 11240 - protein, 15 aa, Artificial Sequence
  Synthetically generated peptide
  VARIANT (1)..(15): Xaa = Any Amino Acid
ACEFCANPACTGXXC

SEQ ID NO: 11241 - protein, 16 aa, Artificial Sequence
  Synthetically generated peptide
  VARIANT (1)..(16): Xaa = Any Amino Acid
ACEFCANPACTGXXXC

SEQ ID NO: 11242 - protein, 17 aa, Artificial Sequence
  Synthetically generated peptide
  VARIANT (1)..(17): Xaa = Any Amino Acid
ACEFCANPACTGXXXXC

SEQ ID NO: 11243 - protein, 14 aa, Artificial Sequence
  Synthetically generated peptide
  VARIANT (1)..(14): Xaa = Any Amino Acid
CCXEFACNPACTGA

SEQ ID NO: 11244 - protein, 15 aa, Artificial Sequence
  Synthetically generated peptide
  VARIANT (1)..(15): Xaa = Any Amino Acid
CCXXEFACNPACTGA

SEQ ID NO: 11245 - protein, 16 aa, Artificial Sequence
  Synthetically generated peptide
  VARIANT (1)..(16): Xaa = Any Amino Acid
CCXXXEFACNPACTGA

SEQ ID NO: 11246 - protein, 17 aa, Artificial Sequence
  Synthetically generated peptide
  VARIANT (1)..(17): Xaa = Any Amino Acid
CCXXXXEFACNPACTGA

SEQ ID NO: 11247 - protein, 17 aa, Artificial Sequence
  Synthetically generated peptide
  VARIANT (1)..(17): Xaa = Any Amino Acid
CCXXXEXFACNPACTGA

SEQ ID NO: 11248 - protein, 17 aa, Artificial Sequence
  Synthetically generated peptide
  VARIANT (1)..(17): Xaa = Any Amino Acid
CCXXXEFXACNPACTGA

SEQ ID NO: 11249 - protein, 17 aa, Artificial Sequence
  Synthetically generated peptide
  VARIANT (1)..(17): Xaa = Any Amino Acid
CCXXXEFACXNPACTGA

SEQ ID NO: 11250 - protein, 17 aa, Artificial Sequence
  Synthetically generated peptide
  VARIANT (1)..(17): Xaa = Any Amino Acid
CCXXXEFACNXPACTGA

SEQ ID NO: 11251 - protein, 17 aa, Artificial Sequence
  Synthetically generated peptide
  VARIANT (1)..(17): Xaa = Any Amino Acid
CCXXXEFACNPXACTGA

SEQ ID NO: 11252 - protein, 17 aa, Artificial Sequence
  Synthetically generated peptide
  VARIANT (1)..(17): Xaa = Any Amino Acid
CCXXXEFACNPAXCTGA

SEQ ID NO: 11253 - protein, 17 aa, Artificial Sequence
  Synthetically generated peptide
  VARIANT (1)..(17): Xaa = Any Amino Acid
CCXXXEFACNPACXTGA

SEQ ID NO: 11254 - protein, 17 aa, Artificial Sequence
  Synthetically generated peptide
  VARIANT (1)..(17): Xaa = Any Amino Acid
CCXXXEFACNPACTXGA

SEQ ID NO: 11255 - protein, 17 aa, Artificial Sequence
  Synthetically generated peptide
  VARIANT (1)..(17): Xaa = Any Amino Acid
CCXXXEFACNPACTGXA

SEQ ID NO: 11256 - protein, 16 aa, Artificial Sequence
  Synthetically generated peptide
  VARIANT (1)..(16): Xaa = Any Amino Acid
CCXXEXFACNPACTGA

SEQ ID NO: 11257 - protein, 17 aa, Artificial Sequence
  Synthetically generated peptide
  VARIANT (1)..(17): Xaa = Any Amino Acid
CCXXEXXFACNPACTGA

SEQ ID NO: 11258 - protein, 17 aa, Artificial Sequence
  Synthetically generated peptide
  VARIANT (1)..(17): Xaa = Any Amino Acid
CCXXEXFXACNPACTGA

SEQ ID NO: 11259 - protein, 17 aa, Artificial Sequence
  Synthetically generated peptide
  VARIANT (1)..(17): Xaa = Any Amino Acid
CCXXEXFACXNPACTGA

SEQ ID NO: 11260 - protein, 17 aa, Artificial Sequence
  Synthetically generated peptide
  VARIANT (1)..(17): Xaa = Any Amino Acid
CCXXEXFACNXPACTGA

SEQ ID NO: 11261 - protein, 17 aa, Artificial Sequence
  Synthetically generated peptide
  VARIANT (1)..(17): Xaa = Any Amino Acid
CCXXEXFACNPXACTGA

SEQ ID NO: 11262 - protein, 17 aa, Artificial Sequence
  Synthetically generated peptide
  VARIANT (1)..(17): Xaa = Any Amino Acid
CCXXEXFACNPAXCTGA

SEQ ID NO: 11263 - protein, 17 aa, Artificial Sequence
  Synthetically generated peptide
  VARIANT (1)..(17): Xaa = Any Amino Acid
CCXXEXFACNPACXTGA

SEQ ID NO: 11264 - protein, 17 aa, Artificial Sequence
  Synthetically generated peptide
  VARIANT (1)..(17): Xaa = Any Amino Acid
CCXXEXFACNPACTXGA

SEQ ID NO: 11265 - protein, 17 aa, Artificial Sequence
  Synthetically generated peptide
  VARIANT (1)..(17): Xaa = Any Amino Acid
CCXXEXFACNPACTGXA

SEQ ID NO: 11266 - protein, 16 aa, Artificial Sequence
  Synthetically generated peptide
  VARIANT (1)..(16): Xaa = Any Amino Acid
CCXXEFXACNPACTGA

SEQ ID NO: 11267 - protein, 17 aa, Artificial Sequence
  Synthetically generated peptide
  VARIANT (1)..(17): Xaa = Any Amino Acid
CCXXEFXXACNPACTGA

SEQ ID NO: 11268 - protein, 17 aa, Artificial Sequence
  Synthetically generated peptide
  VARIANT (1)..(17): Xaa = Any Amino Acid
CCXXEFXACXNPACTGA

SEQ ID NO: 11269 - protein, 17 aa, Artificial Sequence
  Synthetically generated peptide
  VARIANT (1)..(17): Xaa = Any Amino Acid
CCXXEFXACNXPACTGA

SEQ ID NO: 11270 - protein, 17 aa, Artificial Sequence
  Synthetically generated peptide
  VARIANT (1)..(17): Xaa = Any Amino Acid
CCXXEFXACNPXACTGA

SEQ ID NO: 11271 - protein, 17 aa, Artificial Sequence
  Synthetically generated peptide
  VARIANT (1)..(17): Xaa = Any Amino Acid
CCXXEFXACNPAXCTGA

SEQ ID NO: 11272 - protein, 17 aa, Artificial Sequence
  Synthetically generated peptide
  VARIANT (1)..(17): Xaa = Any Amino Acid
CCXXEFXACNPACXTGA

SEQ ID NO: 11273 - protein, 17 aa, Artificial Sequence
  Synthetically generated peptide
  VARIANT (1)..(17): Xaa = Any Amino Acid
CCXXEFXACNPACTXGA

SEQ ID NO: 11274 - protein, 17 aa, Artificial Sequence
  Synthetically generated peptide
  VARIANT (1)..(17): Xaa = Any Amino Acid
CCXXEFXACNPACTGXA

SEQ ID NO: 11275 - protein, 16 aa, Artificial Sequence
  Synthetically generated peptide
  VARIANT (1)..(16): Xaa = Any Amino Acid
CCXXEFACXNPACTGA

SEQ ID NO: 11276 - protein, 17 aa, Artificial Sequence
  Synthetically generated peptide
  VARIANT (1)..(17): Xaa = Any Amino Acid
CCXXEFACXXNPACTGA

SEQ ID NO: 11277 - protein, 17 aa, Artificial Sequence
  Synthetically generated peptide
  VARIANT (1)..(17): Xaa = Any Amino Acid
CCXXEFACXNXPACTGA

SEQ ID NO: 11278 - protein, 17 aa, Artificial Sequence
  Synthetically generated peptide
  VARIANT (1)..(17): Xaa = Any Amino Acid
CCXXEFACXNPXACTGA

SEQ ID NO: 11279 - protein, 17 aa, Artificial Sequence
  Synthetically generated peptide
  VARIANT (1)..(17): Xaa = Any Amino Acid
CCXXEFACXNPAXCTGA

SEQ ID NO: 11280 - protein, 17 aa, Artificial Sequence
  Synthetically generated peptide
  VARIANT (1)..(17): Xaa = Any Amino Acid
CCXXEFACXNPACXTGA

SEQ ID NO: 11281 - protein, 17 aa, Artificial Sequence
  Synthetically generated peptide
  VARIANT (1)..(17): Xaa = Any Amino Acid
CCXXEFACXNPACTXGA

SEQ ID NO: 11282 - protein, 17 aa, Artificial Sequence
  Synthetically generated peptide
  VARIANT (1)..(17): Xaa = Any Amino Acid
CCXXEFACXNPACTGXA

SEQ ID NO: 11283 - protein, 16 aa, Artificial Sequence
  Synthetically generated peptide
  VARIANT (1)..(16): Xaa = Any Amino Acid
CCXXEFACNXPACTGA

SEQ ID NO: 11284 - protein, 17 aa, Artificial Sequence
  Synthetically generated peptide
  VARIANT (1)..(17): Xaa = Any Amino Acid
CCXXEFACNXXPACTGA

SEQ ID NO: 11285 - protein, 17 aa, Artificial Sequence
  Synthetically generated peptide
  VARIANT (1)..(17): Xaa = Any Amino Acid
CCXXEFACNXPXACTGA

SEQ ID NO: 11286 - protein, 17 aa, Artificial Sequence
  Synthetically generated peptide
  VARIANT (1)..(17): Xaa = Any Amino Acid
CCXXEFACNXPAXCTGA

SEQ ID NO: 11287 - protein, 17 aa, Artificial Sequence
  Synthetically generated peptide
  VARIANT (1)..(17): Xaa = Any Amino Acid
CCXXEFACNXPACXTGA

SEQ ID NO: 11288 - protein, 17 aa, Artificial Sequence
  Synthetically generated peptide
  VARIANT (1)..(17): Xaa = Any Amino Acid
CCXXEFACNXPACTXGA

SEQ ID NO: 11289 - protein, 17 aa, Artificial Sequence
  Synthetically generated peptide
  VARIANT (1)..(17): Xaa = Any Amino Acid
CCXXEFACNXPACTGXA

SEQ ID NO: 11290 - protein, 16 aa, Artificial Sequence
  Synthetically generated peptide
  VARIANT (1)..(16): Xaa = Any Amino Acid
CCXXEFACNPXACTGA

SEQ ID NO: 11291 - protein, 17 aa, Artificial Sequence
  Synthetically generated peptide
  VARIANT (1)..(17): Xaa = Any Amino Acid
CCXXEFACNPXXACTGA

SEQ ID NO: 11292 - protein, 17 aa, Artificial Sequence
  Synthetically generated peptide
  VARIANT (1)..(17): Xaa = Any Amino Acid
CCXXEFACNPXAXCTGA

SEQ ID NO: 11293 - protein, 17 aa, Artificial Sequence
  Synthetically generated peptide
  VARIANT (1)..(17): Xaa = Any Amino Acid
CCXXEFACNPXACXTGA

SEQ ID NO: 11294 - protein, 17 aa, Artificial Sequence
  Synthetically generated peptide
  VARIANT (1)..(17): Xaa = Any Amino Acid
CCXXEFACNPXACTXGA

SEQ ID NO: 11295 - protein, 17 aa, Artificial Sequence
  Synthetically generated peptide
  VARIANT (1)..(17): Xaa = Any Amino Acid
CCXXEFACNPXACTGXA

SEQ ID NO: 11296 - protein, 16 aa, Artificial Sequence
  Synthetically generated peptide
  VARIANT (1)..(16): Xaa = Any Amino Acid
CCXXEFACNPAXCTGA

SEQ ID NO: 11297 - protein, 17 aa, Artificial Sequence
  Synthetically generated peptide
  VARIANT (1)..(17): Xaa = Any Amino Acid
CCXXEFACNPAXXCTGA

SEQ ID NO: 11298 - protein, 17 aa, Artificial Sequence
  Synthetically generated peptide
  VARIANT (1)..(17): Xaa = Any Amino Acid
CCXXEFACNPAXCXTGA

SEQ ID NO: 11299 - protein, 17 aa, Artificial Sequence
  Synthetically generated peptide
  VARIANT (1)..(17): Xaa = Any Amino Acid
CCXXEFACNPAXCTXGA

SEQ ID NO: 11300 - protein, 17 aa, Artificial Sequence
  Synthetically generated peptide
  VARIANT (1)..(17): Xaa = Any Amino Acid
CCXXEFACNPAXCTGXA

SEQ ID NO: 11301 - protein, 16 aa, Artificial Sequence
  Synthetically generated peptide
  VARIANT (1)..(16): Xaa = Any Amino Acid
CCXXEFACNPACXTGA

SEQ ID NO: 11302 - protein, 17 aa, Artificial Sequence
  Synthetically generated peptide
  VARIANT (1)..(17): Xaa = Any Amino Acid
CCXXEFACNPACXXTGA

SEQ ID NO: 11303 - protein, 17 aa, Artificial Sequence
  Synthetically generated peptide
  VARIANT (1)..(17): Xaa = Any Amino Acid
CCXXEFACNPACXTXGA

SEQ ID NO: 11304 - protein, 17 aa, Artificial Sequence
  Synthetically generated peptide
  VARIANT (1)..(17): Xaa = Any Amino Acid
CCXXEFACNPACXTGXA

SEQ ID NO: 11305 - protein, 16 aa, Artificial Sequence
  Synthetically generated peptide
  VARIANT (1)..(16): Xaa = Any Amino Acid
CCXXEFACNPACTXGA

SEQ ID NO: 11306 - protein, 17 aa, Artificial Sequence
  Synthetically generated peptide
  VARIANT (1)..(17): Xaa = Any Amino Acid
CCXXEFACNPACTXXGA

SEQ ID NO: 11307 - protein, 17 aa, Artificial Sequence
  Synthetically generated peptide
  VARIANT (1)..(17): Xaa = Any Amino Acid
CCXXEFACNPACTXGXA

SEQ ID NO: 11308 - protein, 16 aa, Artificial Sequence
  Synthetically generated peptide
  VARIANT (1)..(16): Xaa = Any Amino Acid
CCXXEFACNPACTGXA

SEQ ID NO: 11309 - protein, 17 aa, Artificial Sequence
  Synthetically generated peptide
  VARIANT (1)..(17): Xaa = Any Amino Acid
CCXXEFACNPACTGXXA

SEQ ID NO: 11310 - protein, 15 aa, Artificial Sequence
  Synthetically generated peptide
  VARIANT (1)..(15): Xaa = Any Amino Acid
CCXEXFACNPACTGA

SEQ ID NO: 11311 - protein, 16 aa, Artificial Sequence
  Synthetically generated peptide
  VARIANT (1)..(16): Xaa = Any Amino Acid
CCXEXXFACNPACTGA

SEQ ID NO: 11312 - protein, 17 aa, Artificial Sequence
  Synthetically generated peptide
  VARIANT (1)..(17): Xaa = Any Amino Acid
CCXEXXXFACNPACTGA

SEQ ID NO: 11313 - protein, 17 aa, Artificial Sequence
  Synthetically generated peptide
  VARIANT (1)..(17): Xaa = Any Amino Acid
CCXEXXFXACNPACTGA

SEQ ID NO: 11314 - protein, 17 aa, Artificial Sequence
  Synthetically generated peptide
  VARIANT (1)..(17): Xaa = Any Amino Acid
CCXEXXFACXNPACTGA

SEQ ID NO: 11315 - protein, 17 aa, Artificial Sequence
  Synthetically generated peptide
  VARIANT (1)..(17): Xaa = Any Amino Acid
CCXEXXFACNXPACTGA

SEQ ID NO: 11316 - protein, 17 aa, Artificial Sequence
  Synthetically generated peptide
  VARIANT (1)..(17): Xaa = Any Amino Acid
CCXEXXFACNPXACTGA

SEQ ID NO: 11317 - protein, 17 aa, Artificial Sequence
  Synthetically generated peptide
  VARIANT (1)..(17): Xaa = Any Amino Acid
CCXEXXFACNPAXCTGA

SEQ ID NO: 11318 - protein, 17 aa, Artificial Sequence
  Synthetically generated peptide
  VARIANT (1)..(17): Xaa = Any Amino Acid
CCXEXXFACNPACXTGA

SEQ ID NO: 11319 - protein, 17 aa, Artificial Sequence
  Synthetically generated peptide
  VARIANT (1)..(17): Xaa = Any Amino Acid
CCXEXXFACNPACTXGA

SEQ ID NO: 11320 - protein, 17 aa, Artificial Sequence
  Synthetically generated peptide
  VARIANT (1)..(17): Xaa = Any Amino Acid
CCXEXXFACNPACTGXA

SEQ ID NO: 11321 - protein, 16 aa, Artificial Sequence
  Synthetically generated peptide
  VARIANT (1)..(16): Xaa = Any Amino Acid
CCXEXFXACNPACTGA

SEQ ID NO: 11322 - protein, 17 aa, Artificial Sequence
  Synthetically generated peptide
  VARIANT (1)..(17): Xaa = Any Amino Acid
CCXEXFXXACNPACTGA

SEQ ID NO: 11323 - protein, 17 aa, Artificial Sequence
  Synthetically generated peptide
  VARIANT (1)..(17): Xaa = Any Amino Acid
CCXEXFXACXNPACTGA

SEQ ID NO: 11324 - protein, 17 aa, Artificial Sequence
  Synthetically generated peptide
  VARIANT (1)..(17): Xaa = Any Amino Acid
CCXEXFXACNXPACTGA

SEQ ID NO: 11325 - protein, 17 aa, Artificial Sequence
  Synthetically generated peptide
  VARIANT (1)..(17): Xaa = Any Amino Acid
CCXEXFXACNPXACTGA

SEQ ID NO: 11326 - protein, 17 aa, Artificial Sequence
  Synthetically generated peptide
  VARIANT (1)..(17): Xaa = Any Amino Acid
CCXEXFXACNPAXCTGA

SEQ ID NO: 11327 - protein, 17 aa, Artificial Sequence
  Synthetically generated peptide
  VARIANT (1)..(17): Xaa = Any Amino Acid
CCXEXFXACNPACXTGA

SEQ ID NO: 11328 - protein, 17 aa, Artificial Sequence
  Synthetically generated peptide
  VARIANT (1)..(17): Xaa = Any Amino Acid
CCXEXFXACNPACTXGA

SEQ ID NO: 11329 - protein, 17 aa, Artificial Sequence
  Synthetically generated peptide
  VARIANT (1)..(17): Xaa = Any Amino Acid
CCXEXFXACNPACTGXA

SEQ ID NO: 11330 - protein, 16 aa, Artificial Sequence
  Synthetically generated peptide
  VARIANT (1)..(16): Xaa = Any Amino Acid
CCXEXFACXNPACTGA

SEQ ID NO: 11331 - protein, 17 aa, Artificial Sequence
  Synthetically generated peptide
  VARIANT (1)..(17): Xaa = Any Amino Acid
CCXEXFACXXNPACTGA

SEQ ID NO: 11332 - protein, 17 aa, Artificial Sequence
  Synthetically generated peptide
  VARIANT (1)..(17): Xaa = Any Amino Acid
CCXEXFACXNXPACTGA

SEQ ID NO: 11333 - protein, 17 aa, Artificial Sequence
  Synthetically generated peptide
  VARIANT (1)..(17): Xaa = Any Amino Acid
CCXEXFACXNPXACTGA

SEQ ID NO: 11334 - protein, 17 aa, Artificial Sequence
  Synthetically generated peptide
  VARIANT (1)..(17): Xaa = Any Amino Acid
CCXEXFACXNPAXCTGA

SEQ ID NO: 11335 - protein, 17 aa, Artificial Sequence
  Synthetically generated peptide
  VARIANT (1)..(17): Xaa = Any Amino Acid
CCXEXFACXNPACXTGA

SEQ ID NO: 11336 - protein, 17 aa, Artificial Sequence
  Synthetically generated peptide
  VARIANT (1)..(17): Xaa = Any Amino Acid
CCXEXFACXNPACTXGA

SEQ ID NO: 11337 - protein, 17 aa, Artificial Sequence
  Synthetically generated peptide
  VARIANT (1)..(17): Xaa = Any Amino Acid
CCXEXFACXNPACTGXA

SEQ ID NO: 11338 - protein, 16 aa, Artificial Sequence
  Synthetically generated peptide
  VARIANT (1)..(16): Xaa = Any Amino Acid
CCXEXFACNXPACTGA

SEQ ID NO: 11339 - protein, 17 aa, Artificial Sequence
  Synthetically generated peptide
  VARIANT (1)..(17): Xaa = Any Amino Acid
CCXEXFACNXXPACTGA

SEQ ID NO: 11340 - protein, 17 aa, Artificial Sequence
  Synthetically generated peptide
  VARIANT (1)..(17): Xaa = Any Amino Acid
CCXEXFACNXPXACTGA

SEQ ID NO: 11341 - protein, 17 aa, Artificial Sequence
  Synthetically generated peptide
  VARIANT (1)..(17): Xaa = Any Amino Acid
CCXEXFACNXPAXCTGA

SEQ ID NO: 11342 - protein, 17 aa, Artificial Sequence
  Synthetically generated peptide
  VARIANT (1)..(17): Xaa = Any Amino Acid
CCXEXFACNXPACXTGA

SEQ ID NO: 11343 - protein, 17 aa, Artificial Sequence
  Synthetically generated peptide
  VARIANT (1)..(17): Xaa = Any Amino Acid
CCXEXFACNXPACTXGA

SEQ ID NO: 11344 - protein, 17 aa, Artificial Sequence
  Synthetically generated peptide
  VARIANT (1)..(17): Xaa = Any Amino Acid
CCXEXFACNXPACTGXA

SEQ ID NO: 11345 - protein, 16 aa, Artificial Sequence
  Synthetically generated peptide
  VARIANT (1)..(16): Xaa = Any Amino Acid
CCXEXFACNPXACTGA

SEQ ID NO: 11346 - protein, 17 aa, Artificial Sequence
  Synthetically generated peptide
  VARIANT (1)..(17): Xaa = Any Amino Acid
CCXEXFACNPXXACTGA

SEQ ID NO: 11347 - protein, 17 aa, Artificial Sequence
  Synthetically generated peptide
  VARIANT (1)..(17): Xaa = Any Amino Acid
CCXEXFACNPXAXCTGA

SEQ ID NO: 11348 - protein, 17 aa, Artificial Sequence
  Synthetically generated peptide
  VARIANT (1)..(17): Xaa = Any Amino Acid
CCXEXFACNPXACXTGA

SEQ ID NO: 11349 - protein, 17 aa, Artificial Sequence
  Synthetically generated peptide
  VARIANT (1)..(17): Xaa = Any Amino Acid
CCXEXFACNPXACTXGA

SEQ ID NO: 11350 - protein, 17 aa, Artificial Sequence
  Synthetically generated peptide
  VARIANT (1)..(17): Xaa = Any Amino Acid
CCXEXFACNPXACTGXA

SEQ ID NO: 11351 - protein, 16 aa, Artificial Sequence
  Synthetically generated peptide
  VARIANT (1)..(16): Xaa = Any Amino Acid
CCXEXFACNPAXCTGA

SEQ ID NO: 11352 - protein, 17 aa, Artificial Sequence
  Synthetically generated peptide
  VARIANT (1)..(17): Xaa = Any Amino Acid
CCXEXFACNPAXXCTGA

SEQ ID NO: 11353 - protein, 17 aa, Artificial Sequence
  Synthetically generated peptide
  VARIANT (1)..(17): Xaa = Any Amino Acid
CCXEXFACNPAXCXTGA

SEQ ID NO: 11354 - protein, 17 aa, Artificial Sequence
  Synthetically generated peptide
  VARIANT (1)..(17): Xaa = Any Amino Acid
CCXEXFACNPAXCTXGA

SEQ ID NO: 11355 - protein, 17 aa, Artificial Sequence
  Synthetically generated peptide
  VARIANT (1)..(17): Xaa = Any Amino Acid
CCXEXFACNPAXCTGXA

SEQ ID NO: 11356 - protein, 16 aa, Artificial Sequence
  Synthetically generated peptide
  VARIANT (1)..(16): Xaa = Any Amino Acid
CCXEXFACNPACXTGA

SEQ ID NO: 11357 - protein, 17 aa, Artificial Sequence
  Synthetically generated peptide
  VARIANT (1)..(17): Xaa = Any Amino Acid
CCXEXFACNPACXXTGA

SEQ ID NO: 11358 - protein, 17 aa, Artificial Sequence
  Synthetically generated peptide
  VARIANT (1)..(17): Xaa = Any Amino Acid
CCXEXFACNPACXTXGA

SEQ ID NO: 11359 - protein, 17 aa, Artificial Sequence
  Synthetically generated peptide
  VARIANT (1)..(17): Xaa = Any Amino Acid
CCXEXFACNPACXTGXA

SEQ ID NO: 11360 - protein, 16 aa, Artificial Sequence
  Synthetically generated peptide
  VARIANT (1)..(16): Xaa = Any Amino Acid
CCXEXFACNPACTXGA

SEQ ID NO: 11361 - protein, 17 aa, Artificial Sequence
  Synthetically generated peptide
  VARIANT (1)..(17): Xaa = Any Amino Acid
CCXEXFACNPACTXXGA

SEQ ID NO: 11362 - protein, 17 aa, Artificial Sequence
  Synthetically generated peptide
  VARIANT (1)..(17): Xaa = Any Amino Acid
CCXEXFACNPACTXGXA

SEQ ID NO: 11363 - protein, 16 aa, Artificial Sequence
  Synthetically generated peptide
  VARIANT (1)..(16): Xaa = Any Amino Acid
CCXEXFACNPACTGXA

SEQ ID NO: 11364 - protein, 17 aa, Artificial Sequence
  Synthetically generated peptide
  VARIANT (1)..(17): Xaa = Any Amino Acid
CCXEXFACNPACTGXXA

SEQ ID NO: 11365 - protein, 15 aa, Artificial Sequence
  Synthetically generated peptide
  VARIANT (1)..(15): Xaa = Any Amino Acid
CCXEFXACNPACTGA

SEQ ID NO: 11366 - protein, 16 aa, Artificial Sequence
  Synthetically generated peptide
  VARIANT (1)..(16): Xaa = Any Amino Acid
CCXEFXXACNPACTGA

SEQ ID NO: 11367 - protein, 17 aa, Artificial Sequence
  Synthetically generated peptide
  VARIANT (1)..(17): Xaa = Any Amino Acid
CCXEFXXXACNPACTGA

SEQ ID NO: 11368 - protein, 17 aa, Artificial Sequence
  Synthetically generated peptide
  VARIANT (1)..(17): Xaa = Any Amino Acid
CCXEFXXACXNPACTGA

SEQ ID NO: 11369 - protein, 17 aa, Artificial Sequence
  Synthetically generated peptide
  VARIANT (1)..(17): Xaa = Any Amino Acid
CCXEFXXACNXPACTGA

SEQ ID NO: 11370 - protein, 17 aa, Artificial Sequence
  Synthetically generated peptide
  VARIANT (1)..(17): Xaa = Any Amino Acid
CCXEFXXACNPXACTGA

SEQ ID NO: 11371 - protein, 17 aa, Artificial Sequence
  Synthetically generated peptide
  VARIANT (1)..(17): Xaa = Any Amino Acid
CCXEFXXACNPAXCTGA

SEQ ID NO: 11372 - protein, 17 aa, Artificial Sequence
  Synthetically generated peptide
  VARIANT (1)..(17): Xaa = Any Amino Acid
CCXEFXXACNPACXTGA

SEQ ID NO: 11373 - protein, 17 aa, Artificial Sequence
  Synthetically generated peptide
  VARIANT (1)..(17): Xaa = Any Amino Acid
CCXEFXXACNPACTXGA

SEQ ID NO: 11374 - protein, 17 aa, Artificial Sequence
  Synthetically generated peptide
  VARIANT (1)..(17): Xaa = Any Amino Acid
CCXEFXXACNPACTGXA

SEQ ID NO: 11375 - protein, 16 aa, Artificial Sequence
  Synthetically generated peptide
  VARIANT (1)..(16): Xaa = Any Amino Acid
CCXEFXACXNPACTGA

SEQ ID NO: 11376 - protein, 17 aa, Artificial Sequence
  Synthetically generated peptide
  VARIANT (1)..(17): Xaa = Any Amino Acid
CCXEFXACXXNPACTGA

SEQ ID NO: 11377 - protein, 17 aa, Artificial Sequence
  Synthetically generated peptide
  VARIANT (1)..(17): Xaa = Any Amino Acid
CCXEFXACXNXPACTGA

SEQ ID NO: 11378 - protein, 17 aa, Artificial Sequence
  Synthetically generated peptide
  VARIANT (1)..(17): Xaa = Any Amino Acid
CCXEFXACXNPXACTGA

SEQ ID NO: 11379 - protein, 17 aa, Artificial Sequence
  Synthetically generated peptide
  VARIANT (1)..(17): Xaa = Any Amino Acid
CCXEFXACXNPAXCTGA

SEQ ID NO: 11380 - protein, 17 aa, Artificial Sequence
  Synthetically generated peptide
  VARIANT (1)..(17): Xaa = Any Amino Acid
CCXEFXACXNPACXTGA

SEQ ID NO: 11381 - protein, 17 aa, Artificial Sequence
  Synthetically generated peptide
  VARIANT (1)..(17): Xaa = Any Amino Acid
CCXEFXACXNPACTXGA

SEQ ID NO: 11382 - protein, 17 aa, Artificial Sequence
  Synthetically generated peptide
  VARIANT (1)..(17): Xaa = Any Amino Acid
CCXEFXACXNPACTGXA

SEQ ID NO: 11383 - protein, 16 aa, Artificial Sequence
  Synthetically generated peptide
  VARIANT (1)..(16): Xaa = Any Amino Acid
CCXEFXACNXPACTGA

SEQ ID NO: 11384 - protein, 17 aa, Artificial Sequence
  Synthetically generated peptide
  VARIANT (1)..(17): Xaa = Any Amino Acid
CCXEFXACNXXPACTGA

SEQ ID NO: 11385 - protein, 17 aa, Artificial Sequence
  Synthetically generated peptide
  VARIANT (1)..(17): Xaa = Any Amino Acid
CCXEFXACNXPXACTGA

SEQ ID NO: 11386 - protein, 17 aa, Artificial Sequence
  Synthetically generated peptide
  VARIANT (1)..(17): Xaa = Any Amino Acid
CCXEFXACNXPAXCTGA

SEQ ID NO: 11387 - protein, 17 aa, Artificial Sequence
  Synthetically generated peptide
  VARIANT (1)..(17): Xaa = Any Amino Acid
CCXEFXACNXPACXTGA

SEQ ID NO: 11388 - protein, 17 aa, Artificial Sequence
  Synthetically generated peptide
  VARIANT (1)..(17): Xaa = Any Amino Acid
CCXEFXACNXPACTXGA

SEQ ID NO: 11389 - protein, 17 aa, Artificial Sequence
  Synthetically generated peptide
  VARIANT (1)..(17): Xaa = Any Amino Acid
CCXEFXACNXPACTGXA

SEQ ID NO: 11390 - protein, 16 aa, Artificial Sequence
  Synthetically generated peptide
  VARIANT (1)..(16): Xaa = Any Amino Acid
CCXEFXACNPXACTGA

SEQ ID NO: 11391 - protein, 17 aa, Artificial Sequence
  Synthetically generated peptide
  VARIANT (1)..(17): Xaa = Any Amino Acid
CCXEFXACNPXXACTGA

SEQ ID NO: 11392 - protein, 17 aa, Artificial Sequence
  Synthetically generated peptide
  VARIANT (1)..(17): Xaa = Any Amino Acid
CCXEFXACNPXAXCTGA

SEQ ID NO: 11393 - protein, 17 aa, Artificial Sequence
  Synthetically generated peptide
  VARIANT (1)..(17): Xaa = Any Amino Acid
CCXEFXACNPXACXTGA

SEQ ID NO: 11394 - protein, 17 aa, Artificial Sequence
  Synthetically generated peptide
  VARIANT (1)..(17): Xaa = Any Amino Acid
CCXEFXACNPXACTXGA

SEQ ID NO: 11395 - protein, 17 aa, Artificial Sequence
  Synthetically generated peptide
  VARIANT (1)..(17): Xaa = Any Amino Acid
CCXEFXACNPXACTGXA

SEQ ID NO: 11396 - protein, 16 aa, Artificial Sequence
  Synthetically generated peptide
  VARIANT (1)..(16): Xaa = Any Amino Acid
CCXEFXACNPAXCTGA

SEQ ID NO: 11397 - protein, 17 aa, Artificial Sequence
  Synthetically generated peptide
  VARIANT (1)..(17): Xaa = Any Amino Acid
CCXEFXACNPAXXCTGA

SEQ ID NO: 11398 - protein, 17 aa, Artificial Sequence
  Synthetically generated peptide
  VARIANT (1)..(17): Xaa = Any Amino Acid
CCXEFXACNPAXCXTGA

SEQ ID NO: 11399 - protein, 17 aa, Artificial Sequence
  Synthetically generated peptide
  VARIANT (1)..(17): Xaa = Any Amino Acid
CCXEFXACNPAXCTXGA

SEQ ID NO: 11400 - protein, 17 aa, Artificial Sequence
  Synthetically generated peptide
  VARIANT (1)..(17): Xaa = Any Amino Acid
CCXEFXACNPAXCTGXA

SEQ ID NO: 11401 - protein, 16 aa, Artificial Sequence
  Synthetically generated peptide
  VARIANT (1)..(16): Xaa = Any Amino Acid
CCXEFXACNPACXTGA

SEQ ID NO: 11402 - protein, 17 aa, Artificial Sequence
  Synthetically generated peptide
  VARIANT (1)..(17): Xaa = Any Amino Acid
CCXEFXACNPACXXTGA

SEQ ID NO: 11403 - protein, 17 aa, Artificial Sequence
  Synthetically generated peptide
  VARIANT (1)..(17): Xaa = Any Amino Acid
CCXEFXACNPACXTXGA

SEQ ID NO: 11404 - protein, 17 aa, Artificial Sequence
  Synthetically generated peptide
  VARIANT (1)..(17): Xaa = Any Amino Acid
CCXEFXACNPACXTGXA

SEQ ID NO: 11405 - protein, 16 aa, Artificial Sequence
  Synthetically generated peptide
  VARIANT (1)..(16): Xaa = Any Amino Acid
CCXEFXACNPACTXGA

SEQ ID NO: 11406 - protein, 17 aa, Artificial Sequence
  Synthetically generated peptide
  VARIANT (1)..(17): Xaa = Any Amino Acid
CCXEFXACNPACTXXGA

SEQ ID NO: 11407 - protein, 17 aa, Artificial Sequence
  Synthetically generated peptide
  VARIANT (1)..(17): Xaa = Any Amino Acid
CCXEFXACNPACTXGXA

SEQ ID NO: 11408 - protein, 16 aa, Artificial Sequence
  Synthetically generated peptide
  VARIANT (1)..(16): Xaa = Any Amino Acid
CCXEFXACNPACTGXA

SEQ ID NO: 11409 - protein, 17 aa, Artificial Sequence
  Synthetically generated peptide
  VARIANT (1)..(17): Xaa = Any Amino Acid
CCXEFXACNPACTGXXA

SEQ ID NO: 11410 - protein, 15 aa, Artificial Sequence
  Synthetically generated peptide
  VARIANT (1)..(15): Xaa = Any Amino Acid
CCXEFACXNPACTGA

SEQ ID NO: 11411 - protein, 16 aa, Artificial Sequence
  Synthetically generated peptide
  VARIANT (1)..(16): Xaa = Any Amino Acid
CCXEFACXXNPACTGA

SEQ ID NO: 11412 - protein, 17 aa, Artificial Sequence
  Synthetically generated peptide
  VARIANT (1)..(17): Xaa = Any Amino Acid
CCXEFACXXXNPACTGA

SEQ ID NO: 11413 - protein, 17 aa, Artificial Sequence
  Synthetically generated peptide
  VARIANT (1)..(17): Xaa = Any Amino Acid
CCXEFACXXNXPACTGA

SEQ ID NO: 11414 - protein, 17 aa, Artificial Sequence
  Synthetically generated peptide
  VARIANT (1)..(17): Xaa = Any Amino Acid
CCXEFACXXNPXACTGA

SEQ ID NO: 11415 - protein, 17 aa, Artificial Sequence
  Synthetically generated peptide
  VARIANT (1)..(17): Xaa = Any Amino Acid
CCXEFACXXNPAXCTGA

SEQ ID NO: 11416 - protein, 17 aa, Artificial Sequence
  Synthetically generated peptide
  VARIANT (1)..(17): Xaa = Any Amino Acid
CCXEFACXXNPACXTGA

SEQ ID NO: 11417 - protein, 17 aa, Artificial Sequence
  Synthetically generated peptide
  VARIANT (1)..(17): Xaa = Any Amino Acid
CCXEFACXXNPACTXGA

SEQ ID NO: 11418 - protein, 17 aa, Artificial Sequence
  Synthetically generated peptide
  VARIANT (1)..(17): Xaa = Any Amino Acid
CCXEFACXXNPACTGXA

SEQ ID NO: 11419 - protein, 16 aa, Artificial Sequence
  Synthetically generated peptide
  VARIANT (1)..(16): Xaa = Any Amino Acid
CCXEFACXNXPACTGA

SEQ ID NO: 11420 - protein, 17 aa, Artificial Sequence
  Synthetically generated peptide
  VARIANT (1)..(17): Xaa = Any Amino Acid
CCXEFACXNXXPACTGA

SEQ ID NO: 11421 - protein, 17 aa, Artificial Sequence
  Synthetically generated peptide
  VARIANT (1)..(17): Xaa = Any Amino Acid
CCXEFACXNXPXACTGA

SEQ ID NO: 11422 - protein, 17 aa, Artificial Sequence
  Synthetically generated peptide
  VARIANT (1)..(17): Xaa = Any Amino Acid
CCXEFACXNXPAXCTGA

SEQ ID NO: 11423 - protein, 17 aa, Artificial Sequence
  Synthetically generated peptide
  VARIANT (1)..(17): Xaa = Any Amino Acid
CCXEFACXNXPACXTGA

SEQ ID NO: 11424 - protein, 17 aa, Artificial Sequence
  Synthetically generated peptide
  VARIANT (1)..(17): Xaa = Any Amino Acid
CCXEFACXNXPACTXGA

SEQ ID NO: 11425 - protein, 17 aa, Artificial Sequence
  Synthetically generated peptide
  VARIANT (1)..(17): Xaa = Any Amino Acid
CCXEFACXNXPACTGXA

SEQ ID NO: 11426 - protein, 16 aa, Artificial Sequence
  Synthetically generated peptide
  VARIANT (1)..(16): Xaa = Any Amino Acid
CCXEFACXNPXACTGA

SEQ ID NO: 11427 - protein, 17 aa, Artificial Sequence
  Synthetically generated peptide
  VARIANT (1)..(17): Xaa = Any Amino Acid
CCXEFACXNPXXACTGA

SEQ ID NO: 11428 - protein, 17 aa, Artificial Sequence
  Synthetically generated peptide
  VARIANT (1)..(17): Xaa = Any Amino Acid
CCXEFACXNPXAXCTGA

SEQ ID NO: 11429 - protein, 17 aa, Artificial Sequence
  Synthetically generated peptide
  VARIANT (1)..(17): Xaa = Any Amino Acid
CCXEFACXNPXACXTGA

SEQ ID NO: 11430 - protein, 17 aa, Artificial Sequence
  Synthetically generated peptide
  VARIANT (1)..(17): Xaa = Any Amino Acid
CCXEFACXNPXACTXGA

SEQ ID NO: 11431 - protein, 17 aa, Artificial Sequence
  Synthetically generated peptide
  VARIANT (1)..(17): Xaa = Any Amino Acid
CCXEFACXNPXACTGXA

SEQ ID NO: 11432 - protein, 16 aa, Artificial Sequence
  Synthetically generated peptide
  VARIANT (1)..(16): Xaa = Any Amino Acid
CCXEFACXNPAXCTGA

SEQ ID NO: 11433 - protein, 17 aa, Artificial Sequence
  Synthetically generated peptide
  VARIANT (1)..(17): Xaa = Any Amino Acid
CCXEFACXNPAXXCTGA

SEQ ID NO: 11434 - protein, 17 aa, Artificial Sequence
  Synthetically generated peptide
  VARIANT (1)..(17): Xaa = Any Amino Acid
CCXEFACXNPAXCXTGA

SEQ ID NO: 11435 - protein, 17 aa, Artificial Sequence
  Synthetically generated peptide
  VARIANT (1)..(17): Xaa = Any Amino Acid
CCXEFACXNPAXCTXGA

SEQ ID NO: 11436 - protein, 17 aa, Artificial Sequence
  Synthetically generated peptide
  VARIANT (1)..(17): Xaa = Any Amino Acid
CCXEFACXNPAXCTGXA

SEQ ID NO: 11437 - protein, 16 aa, Artificial Sequence
  Synthetically generated peptide
  VARIANT (1)..(16): Xaa = Any Amino Acid
CCXEFACXNPACXTGA

SEQ ID NO: 11438 - protein, 17 aa, Artificial Sequence
  Synthetically generated peptide
  VARIANT (1)..(17): Xaa = Any Amino Acid
CCXEFACXNPACXXTGA

SEQ ID NO: 11439 - protein, 17 aa, Artificial Sequence
  Synthetically generated peptide
  VARIANT (1)..(17): Xaa = Any Amino Acid
CCXEFACXNPACXTXGA

SEQ ID NO: 11440 - protein, 17 aa, Artificial Sequence
  Synthetically generated peptide
  VARIANT (1)..(17): Xaa = Any Amino Acid
CCXEFACXNPACXTGXA

SEQ ID NO: 11441 - protein, 16 aa, Artificial Sequence
  Synthetically generated peptide
  VARIANT (1)..(16): Xaa = Any Amino Acid
CCXEFACXNPACTXGA

SEQ ID NO: 11442 - protein, 17 aa, Artificial Sequence
  Synthetically generated peptide
  VARIANT (1)..(17): Xaa = Any Amino Acid
CCXEFACXNPACTXXGA

SEQ ID NO: 11443 - protein, 17 aa, Artificial Sequence
  Synthetically generated peptide
  VARIANT (1)..(17): Xaa = Any Amino Acid
CCXEFACXNPACTXGXA

SEQ ID NO: 11444 - protein, 16 aa, Artificial Sequence
  Synthetically generated peptide
  VARIANT (1)..(16): Xaa = Any Amino Acid
CCXEFACXNPACTGXA

SEQ ID NO: 11445 - protein, 17 aa, Artificial Sequence
  Synthetically generated peptide
  VARIANT (1)..(17): Xaa = Any Amino Acid
CCXEFACXNPACTGXXA

SEQ ID NO: 11446 - protein, 15 aa, Artificial Sequence
  Synthetically generated peptide
  VARIANT (1)..(15): Xaa = Any Amino Acid
CCXEFACNXPACTGA

SEQ ID NO: 11447 - protein, 16 aa, Artificial Sequence
  Synthetically generated peptide
  VARIANT (1)..(16): Xaa = Any Amino Acid
CCXEFACNXXPACTGA

SEQ ID NO: 11448 - protein, 17 aa, Artificial Sequence
  Synthetically generated peptide
  VARIANT (1)..(17): Xaa = Any Amino Acid
CCXEFACNXXXPACTGA

SEQ ID NO: 11449 - protein, 17 aa, Artificial Sequence
  Synthetically generated peptide
  VARIANT (1)..(17): Xaa = Any Amino Acid
CCXEFACNXXPXACTGA

SEQ ID NO: 11450 - protein, 17 aa, Artificial Sequence
  Synthetically generated peptide
  VARIANT (1)..(17): Xaa = Any Amino Acid
CCXEFACNXXPAXCTGA

SEQ ID NO: 11451 - protein, 17 aa, Artificial Sequence
  Synthetically generated peptide
  VARIANT (1)..(17): Xaa = Any Amino Acid
CCXEFACNXXPACXTGA

SEQ ID NO: 11452 - protein, 17 aa, Artificial Sequence
  Synthetically generated peptide
  VARIANT (1)..(17): Xaa = Any Amino Acid
CCXEFACNXXPACTXGA

SEQ ID NO: 11453 - protein, 17 aa, Artificial Sequence
  Synthetically generated peptide
  VARIANT (1)..(17): Xaa = Any Amino Acid
CCXEFACNXXPACTGXA

SEQ ID NO: 11454 - protein, 16 aa, Artificial Sequence
  Synthetically generated peptide
  VARIANT (1)..(16): Xaa = Any Amino Acid
CCXEFACNXPXACTGA

SEQ ID NO: 11455 - protein, 17 aa, Artificial Sequence
  Synthetically generated peptide
  VARIANT (1)..(17): Xaa = Any Amino Acid
CCXEFACNXPXXACTGA

SEQ ID NO: 11456 - protein, 17 aa, Artificial Sequence
  Synthetically generated peptide
  VARIANT (1)..(17): Xaa = Any Amino Acid
CCXEFACNXPXAXCTGA

SEQ ID NO: 11457 - protein, 17 aa, Artificial Sequence
  Synthetically generated peptide
  VARIANT (1)..(17): Xaa = Any Amino Acid
CCXEFACNXPXACXTGA

SEQ ID NO: 11458 - protein, 17 aa, Artificial Sequence
  Synthetically generated peptide
  VARIANT (1)..(17): Xaa = Any Amino Acid
CCXEFACNXPXACTXGA

SEQ ID NO: 11459 - protein, 17 aa, Artificial Sequence
  Synthetically generated peptide
  VARIANT (1)..(17): Xaa = Any Amino Acid
CCXEFACNXPXACTGXA

SEQ ID NO: 11460 - protein, 16 aa, Artificial Sequence
  Synthetically generated peptide
  VARIANT (1)..(16): Xaa = Any Amino Acid
CCXEFACNXPAXCTGA

SEQ ID NO: 11461 - protein, 17 aa, Artificial Sequence
  Synthetically generated peptide
  VARIANT (1)..(17): Xaa = Any Amino Acid
CCXEFACNXPAXXCTGA

SEQ ID NO: 11462 - protein, 17 aa, Artificial Sequence
  Synthetically generated peptide
  VARIANT (1)..(17): Xaa = Any Amino Acid
CCXEFACNXPAXCXTGA

SEQ ID NO: 11463 - protein, 17 aa, Artificial Sequence
  Synthetically generated peptide
  VARIANT (1)..(17): Xaa = Any Amino Acid
CCXEFACNXPAXCTXGA

SEQ ID NO: 11464 - protein, 17 aa, Artificial Sequence
  Synthetically generated peptide
  VARIANT (1)..(17): Xaa = Any Amino Acid
CCXEFACNXPAXCTGXA

SEQ ID NO: 11465 - protein, 16 aa, Artificial Sequence
  Synthetically generated peptide
  VARIANT (1)..(16): Xaa = Any Amino Acid
CCXEFACNXPACXTGA

SEQ ID NO: 11466 - protein, 17 aa, Artificial Sequence
  Synthetically generated peptide
  VARIANT (1)..(17): Xaa = Any Amino Acid
CCXEFACNXPACXXTGA

SEQ ID NO: 11467 - protein, 17 aa, Artificial Sequence
  Synthetically generated peptide
  VARIANT (1)..(17): Xaa = Any Amino Acid
CCXEFACNXPACXTXGA

SEQ ID NO: 11468 - protein, 17 aa, Artificial Sequence
  Synthetically generated peptide
  VARIANT (1)..(17): Xaa = Any Amino Acid
CCXEFACNXPACXTGXA

SEQ ID NO: 11469 - protein, 16 aa, Artificial Sequence
  Synthetically generated peptide
  VARIANT (1)..(16): Xaa = Any Amino Acid
CCXEFACNXPACTXGA

SEQ ID NO: 11470 - protein, 17 aa, Artificial Sequence
  Synthetically generated peptide
  VARIANT (1)..(17): Xaa = Any Amino Acid
CCXEFACNXPACTXXGA

SEQ ID NO: 11471 - protein, 17 aa, Artificial Sequence
  Synthetically generated peptide
  VARIANT (1)..(17): Xaa = Any Amino Acid
CCXEFACNXPACTXGXA

SEQ ID NO: 11472 - protein, 16 aa, Artificial Sequence
  Synthetically generated peptide
  VARIANT (1)..(16): Xaa = Any Amino Acid
CCXEFACNXPACTGXA

SEQ ID NO: 11473 - protein, 17 aa, Artificial Sequence
  Synthetically generated peptide
  VARIANT (1)..(17): Xaa = Any Amino Acid
CCXEFACNXPACTGXXA

SEQ ID NO: 11474 - protein, 15 aa, Artificial Sequence
  Synthetically generated peptide
  VARIANT (1)..(15): Xaa = Any Amino Acid
CCXEFACNPXACTGA

SEQ ID NO: 11475 - protein, 16 aa, Artificial Sequence
  Synthetically generated peptide
  VARIANT (1)..(16): Xaa = Any Amino Acid
CCXEFACNPXXACTGA

SEQ ID NO: 11476 - protein, 17 aa, Artificial Sequence
  Synthetically generated peptide
  VARIANT (1)..(17): Xaa = Any Amino Acid
CCXEFACNPXXXACTGA

SEQ ID NO: 11477 - protein, 17 aa, Artificial Sequence
  Synthetically generated peptide
  VARIANT (1)..(17): Xaa = Any Amino Acid
CCXEFACNPXXAXCTGA

SEQ ID NO: 11478 - protein, 17 aa, Artificial Sequence
  Synthetically generated peptide
  VARIANT (1)..(17): Xaa = Any Amino Acid
CCXEFACNPXXACXTGA

SEQ ID NO: 11479 - protein, 17 aa, Artificial Sequence
  Synthetically generated peptide
  VARIANT (1)..(17): Xaa = Any Amino Acid
CCXEFACNPXXACTXGA

SEQ ID NO: 11480 - protein, 17 aa, Artificial Sequence
  Synthetically generated peptide
  VARIANT (1)..(17): Xaa = Any Amino Acid
CCXEFACNPXXACTGXA

SEQ ID NO: 11481 - protein, 16 aa, Artificial Sequence
  Synthetically generated peptide
  VARIANT (1)..(16): Xaa = Any Amino Acid
CCXEFACNPXAXCTGA

SEQ ID NO: 11482 - protein, 17 aa, Artificial Sequence
  Synthetically generated peptide
  VARIANT (1)..(17): Xaa = Any Amino Acid
CCXEFACNPXAXXCTGA

SEQ ID NO: 11483 - protein, 17 aa, Artificial Sequence
  Synthetically generated peptide
  VARIANT (1)..(17): Xaa = Any Amino Acid
CCXEFACNPXAXCXTGA

SEQ ID NO: 11484 - protein, 17 aa, Artificial Sequence
  Synthetically generated peptide
  VARIANT (1)..(17): Xaa = Any Amino Acid
CCXEFACNPXAXCTXGA

SEQ ID NO: 11485 - protein, 17 aa, Artificial Sequence
  Synthetically generated peptide
  VARIANT (1)..(17): Xaa = Any Amino Acid
CCXEFACNPXAXCTGXA

SEQ ID NO: 11486 - protein, 16 aa, Artificial Sequence
  Synthetically generated peptide
  VARIANT (1)..(16): Xaa = Any Amino Acid
CCXEFACNPXACXTGA

SEQ ID NO: 11487 - protein, 17 aa, Artificial Sequence
  Synthetically generated peptide
  VARIANT (1)..(17): Xaa = Any Amino Acid
CCXEFACNPXACXXTGA

SEQ ID NO: 11488 - protein, 17 aa, Artificial Sequence
  Synthetically generated peptide
  VARIANT (1)..(17): Xaa = Any Amino Acid
CCXEFACNPXACXTXGA

SEQ ID NO: 11489 - protein, 17 aa, Artificial Sequence
  Synthetically generated peptide
  VARIANT (1)..(17): Xaa = Any Amino Acid
CCXEFACNPXACXTGXA

SEQ ID NO: 11490 - protein, 16 aa, Artificial Sequence
  Synthetically generated peptide
  VARIANT (1)..(16): Xaa = Any Amino Acid
CCXEFACNPXACTXGA

SEQ ID NO: 11491 - protein, 17 aa, Artificial Sequence
  Synthetically generated peptide
  VARIANT (1)..(17): Xaa = Any Amino Acid
CCXEFACNPXACTXXGA

SEQ ID NO: 11492 - protein, 17 aa, Artificial Sequence
  Synthetically generated peptide
  VARIANT (1)..(17): Xaa = Any Amino Acid
CCXEFACNPXACTXGXA

SEQ ID NO: 11493 - protein, 16 aa, Artificial Sequence
  Synthetically generated peptide
  VARIANT (1)..(16): Xaa = Any Amino Acid
CCXEFACNPXACTGXA

SEQ ID NO: 11494 - protein, 17 aa, Artificial Sequence
  Synthetically generated peptide
  VARIANT (1)..(17): Xaa = Any Amino Acid
CCXEFACNPXACTGXXA

SEQ ID NO: 11495 - protein, 15 aa, Artificial Sequence
  Synthetically generated peptide
  VARIANT (1)..(15): Xaa = Any Amino Acid
CCXEFACNPAXCTGA

SEQ ID NO: 11496 - protein, 16 aa, Artificial Sequence
  Synthetically generated peptide
  VARIANT (1)..(16): Xaa = Any Amino Acid
CCXEFACNPAXXCTGA

SEQ ID NO: 11497 - protein, 17 aa, Artificial Sequence
  Synthetically generated peptide
  VARIANT (1)..(17): Xaa = Any Amino Acid
CCXEFACNPAXXXCTGA

SEQ ID NO: 11498 - protein, 17 aa, Artificial Sequence
  Synthetically generated peptide
  VARIANT (1)..(17): Xaa = Any Amino Acid
CCXEFACNPAXXCXTGA

SEQ ID NO: 11499 - protein, 17 aa, Artificial Sequence
  Synthetically generated peptide
  VARIANT (1)..(17): Xaa = Any Amino Acid
CCXEFACNPAXXCTXGA

SEQ ID NO: 11500 - protein, 17 aa, Artificial Sequence
  Synthetically generated peptide
  VARIANT (1)..(17): Xaa = Any Amino Acid
CCXEFACNPAXXCTGXA

SEQ ID NO: 11501 - protein, 16 aa, Artificial Sequence
  Synthetically generated peptide
  VARIANT (1)..(16): Xaa = Any Amino Acid
CCXEFACNPAXCXTGA

SEQ ID NO: 11502 - protein, 17 aa, Artificial Sequence
  Synthetically generated peptide
  VARIANT (1)..(17): Xaa = Any Amino Acid
CCXEFACNPAXCXXTGA

SEQ ID NO: 11503 - protein, 17 aa, Artificial Sequence
  Synthetically generated peptide
  VARIANT (1)..(17): Xaa = Any Amino Acid
CCXEFACNPAXCXTXGA

SEQ ID NO: 11504 - protein, 17 aa, Artificial Sequence
  Synthetically generated peptide
  VARIANT (1)..(17): Xaa = Any Amino Acid
CCXEFACNPAXCXTGXA

SEQ ID NO: 11505 - protein, 16 aa, Artificial Sequence
  Synthetically generated peptide
  VARIANT (1)..(16): Xaa = Any Amino Acid
CCXEFACNPAXCTXGA

SEQ ID NO: 11506 - protein, 17 aa, Artificial Sequence
  Synthetically generated peptide
  VARIANT (1)..(17): Xaa = Any Amino Acid
CCXEFACNPAXCTXXGA

SEQ ID NO: 11507 - protein, 17 aa, Artificial Sequence
  Synthetically generated peptide
  VARIANT (1)..(17): Xaa = Any Amino Acid
CCXEFACNPAXCTXGXA

SEQ ID NO: 11508 - protein, 16 aa, Artificial Sequence
  Synthetically generated peptide
  VARIANT (1)..(16): Xaa = Any Amino Acid
CCXEFACNPAXCTGXA

SEQ ID NO: 11509 - protein, 17 aa, Artificial Sequence
  Synthetically generated peptide
  VARIANT (1)..(17): Xaa = Any Amino Acid
CCXEFACNPAXCTGXXA

SEQ ID NO: 11510 - protein, 15 aa, Artificial Sequence
  Synthetically generated peptide
  VARIANT (1)..(15): Xaa = Any Amino Acid
CCXEFACNPACXTGA

SEQ ID NO: 11511 - protein, 16 aa, Artificial Sequence
  Synthetically generated peptide
  VARIANT (1)..(16): Xaa = Any Amino Acid
CCXEFACNPACXXTGA

SEQ ID NO: 11512 - protein, 17 aa, Artificial Sequence
  Synthetically generated peptide
  VARIANT (1)..(17): Xaa = Any Amino Acid
CCXEFACNPACXXXTGA

SEQ ID NO: 11513 - protein, 17 aa, Artificial Sequence
  Synthetically generated peptide
  VARIANT (1)..(17): Xaa = Any Amino Acid
CCXEFACNPACXXTXGA

SEQ ID NO: 11514 - protein, 17 aa, Artificial Sequence
  Synthetically generated peptide
  VARIANT (1)..(17): Xaa = Any Amino Acid
CCXEFACNPACXXTGXA

SEQ ID NO: 11515 - protein, 16 aa, Artificial Sequence
  Synthetically generated peptide
  VARIANT (1)..(16): Xaa = Any Amino Acid
CCXEFACNPACXTXGA

SEQ ID NO: 11516 - protein, 17 aa, Artificial Sequence
  Synthetically generated peptide
  VARIANT (1)..(17): Xaa = Any Amino Acid
CCXEFACNPACXTXXGA

SEQ ID NO: 11517 - protein, 17 aa, Artificial Sequence
  Synthetically generated peptide
  VARIANT (1)..(17): Xaa = Any Amino Acid
CCXEFACNPACXTXGXA

SEQ ID NO: 11518 - protein, 16 aa, Artificial Sequence
  Synthetically generated peptide
  VARIANT (1)..(16): Xaa = Any Amino Acid
CCXEFACNPACXTGXA

SEQ ID NO: 11519 - protein, 17 aa, Artificial Sequence
  Synthetically generated peptide
  VARIANT (1)..(17): Xaa = Any Amino Acid
CCXEFACNPACXTGXXA

SEQ ID NO: 11520 - protein, 15 aa, Artificial Sequence
  Synthetically generated peptide
  VARIANT (1)..(15): Xaa = Any Amino Acid
CCXEFACNPACTXGA

SEQ ID NO: 11521 - protein, 16 aa, Artificial Sequence
  Synthetically generated peptide
  VARIANT (1)..(16): Xaa = Any Amino Acid
CCXEFACNPACTXXGA

SEQ ID NO: 11522 - protein, 17 aa, Artificial Sequence
  Synthetically generated peptide
  VARIANT (1)..(17): Xaa = Any Amino Acid
CCXEFACNPACTXXXGA

SEQ ID NO: 11523 - protein, 17 aa, Artificial Sequence
  Synthetically generated peptide
  VARIANT (1)..(17): Xaa = Any Amino Acid
CCXEFACNPACTXXGXA

SEQ ID NO: 11524 - protein, 16 aa, Artificial Sequence
  Synthetically generated peptide
  VARIANT (1)..(16): Xaa = Any Amino Acid
CCXEFACNPACTXGXA

SEQ ID NO: 11525 - protein, 17 aa, Artificial Sequence
  Synthetically generated peptide
  VARIANT (1)..(17): Xaa = Any Amino Acid
CCXEFACNPACTXGXXA

SEQ ID NO: 11526 - protein, 15 aa, Artificial Sequence
  Synthetically generated peptide
  VARIANT (1)..(15): Xaa = Any Amino Acid
CCXEFACNPACTGXA

SEQ ID NO: 11527 - protein, 16 aa, Artificial Sequence
  Synthetically generated peptide
  VARIANT (1)..(16): Xaa = Any Amino Acid
CCXEFACNPACTGXXA

SEQ ID NO: 11528 - protein, 17 aa, Artificial Sequence
  Synthetically generated peptide
  VARIANT (1)..(17): Xaa = Any Amino Acid
CCXEFACNPACTGXXXA

SEQ ID NO: 11529 - protein, 14 aa, Artificial Sequence
  Synthetically generated peptide
  VARIANT (1)..(14): Xaa = Any Amino Acid
CCEXFACNPACTGA

SEQ ID NO: 11530 - protein, 15 aa, Artificial Sequence
  Synthetically generated peptide
  VARIANT (1)..(15): Xaa = Any Amino Acid
CCEXXFACNPACTGA

SEQ ID NO: 11531 - protein, 16 aa, Artificial Sequence
  Synthetically generated peptide
  VARIANT (1)..(16): Xaa = Any Amino Acid
CCEXXXFACNPACTGA

SEQ ID NO: 11532 - protein, 17 aa, Artificial Sequence
  Synthetically generated peptide
  VARIANT (1)..(17): Xaa = Any Amino Acid
CCEXXXXFACNPACTGA

SEQ ID NO: 11533 - protein, 17 aa, Artificial Sequence
  Synthetically generated peptide
  VARIANT (1)..(17): Xaa = Any Amino Acid
CCEXXXFXACNPACTGA

SEQ ID NO: 11534 - protein, 17 aa, Artificial Sequence
  Synthetically generated peptide
  VARIANT (1)..(17): Xaa = Any Amino Acid
CCEXXXFACXNPACTGA

SEQ ID NO: 11535 - protein, 17 aa, Artificial Sequence
  Synthetically generated peptide
  VARIANT (1)..(17): Xaa = Any Amino Acid
CCEXXXFACNXPACTGA

SEQ ID NO: 11536 - protein, 17 aa, Artificial Sequence
  Synthetically generated peptide
  VARIANT (1)..(17): Xaa = Any Amino Acid
CCEXXXFACNPXACTGA

SEQ ID NO: 11537 - protein, 17 aa, Artificial Sequence
  Synthetically generated peptide
  VARIANT (1)..(17): Xaa = Any Amino Acid
CCEXXXFACNPAXCTGA

SEQ ID NO: 11538 - protein, 17 aa, Artificial Sequence
  Synthetically generated peptide
  VARIANT (1)..(17): Xaa = Any Amino Acid
CCEXXXFACNPACXTGA

SEQ ID NO: 11539 - protein, 17 aa, Artificial Sequence
  Synthetically generated peptide
  VARIANT (1)..(17): Xaa = Any Amino Acid
CCEXXXFACNPACTXGA

SEQ ID NO: 11540 - protein, 17 aa, Artificial Sequence
  Synthetically generated peptide
  VARIANT (1)..(17): Xaa = Any Amino Acid
CCEXXXFACNPACTGXA

SEQ ID NO: 11541 - protein, 16 aa, Artificial Sequence
  Synthetically generated peptide
  VARIANT (1)..(16): Xaa = Any Amino Acid
CCEXXFXACNPACTGA

SEQ ID NO: 11542 - protein, 17 aa, Artificial Sequence
  Synthetically generated peptide
  VARIANT (1)..(17): Xaa = Any Amino Acid
CCEXXFXXACNPACTGA

SEQ ID NO: 11543 - protein, 17 aa, Artificial Sequence
  Synthetically generated peptide
  VARIANT (1)..(17): Xaa = Any Amino Acid
CCEXXFXACXNPACTGA

SEQ ID NO: 11544 - protein, 17 aa, Artificial Sequence
  Synthetically generated peptide
  VARIANT (1)..(17): Xaa = Any Amino Acid
CCEXXFXACNXPACTGA

SEQ ID NO: 11545 - protein, 17 aa, Artificial Sequence
  Synthetically generated peptide
  VARIANT (1)..(17): Xaa = Any Amino Acid
CCEXXFXACNPXACTGA

SEQ ID NO: 11546 - protein, 17 aa, Artificial Sequence
  Synthetically generated peptide
  VARIANT (1)..(17): Xaa = Any Amino Acid
CCEXXFXACNPAXCTGA

SEQ ID NO: 11547 - protein, 17 aa, Artificial Sequence
  Synthetically generated peptide
  VARIANT (1)..(17): Xaa = Any Amino Acid
CCEXXFXACNPACXTGA

SEQ ID NO: 11548 - protein, 17 aa, Artificial Sequence
  Synthetically generated peptide
  VARIANT (1)..(17): Xaa = Any Amino Acid
CCEXXFXACNPACTXGA

SEQ ID NO: 11549 - protein, 17 aa, Artificial Sequence
  Synthetically generated peptide
  VARIANT (1)..(17): Xaa = Any Amino Acid
CCEXXFXACNPACTGXA

SEQ ID NO: 11550 - protein, 16 aa, Artificial Sequence
  Synthetically generated peptide
  VARIANT (1)..(16): Xaa = Any Amino Acid
CCEXXFACXNPACTGA

SEQ ID NO: 11551 - protein, 17 aa, Artificial Sequence
  Synthetically generated peptide
  VARIANT (1)..(17): Xaa = Any Amino Acid
CCEXXFACXXNPACTGA

SEQ ID NO: 11552 - protein, 17 aa, Artificial Sequence
  Synthetically generated peptide
  VARIANT (1)..(17): Xaa = Any Amino Acid
CCEXXFACXNXPACTGA

SEQ ID NO: 11553 - protein, 17 aa, Artificial Sequence
  Synthetically generated peptide
  VARIANT (1)..(17): Xaa = Any Amino Acid
CCEXXFACXNPXACTGA

SEQ ID NO: 11554 - protein, 17 aa, Artificial Sequence
  Synthetically generated peptide
  VARIANT (1)..(17): Xaa = Any Amino Acid
CCEXXFACXNPAXCTGA

SEQ ID NO: 11555 - protein, 17 aa, Artificial Sequence
  Synthetically generated peptide
  VARIANT (1)..(17): Xaa = Any Amino Acid
CCEXXFACXNPACXTGA

SEQ ID NO: 11556 - protein, 17 aa, Artificial Sequence
  Synthetically generated peptide
  VARIANT (1)..(17): Xaa = Any Amino Acid
CCEXXFACXNPACTXGA

SEQ ID NO: 11557 - protein, 17 aa, Artificial Sequence
  Synthetically generated peptide
  VARIANT (1)..(17): Xaa = Any Amino Acid
CCEXXFACXNPACTGXA

SEQ ID NO: 11558 - protein, 16 aa, Artificial Sequence
  Synthetically generated peptide
  VARIANT (1)..(16): Xaa = Any Amino Acid
CCEXXFACNXPACTGA

SEQ ID NO: 11559 - protein, 17 aa, Artificial Sequence
  Synthetically generated peptide
  VARIANT (1)..(17): Xaa = Any Amino Acid
CCEXXFACNXXPACTGA

SEQ ID NO: 11560 - protein, 17 aa, Artificial Sequence
  Synthetically generated peptide
  VARIANT (1)..(17): Xaa = Any Amino Acid
CCEXXFACNXPXACTGA

SEQ ID NO: 11561 - protein, 17 aa, Artificial Sequence
  Synthetically generated peptide
  VARIANT (1)..(17): Xaa = Any Amino Acid
CCEXXFACNXPAXCTGA

SEQ ID NO: 11562 - protein, 17 aa, Artificial Sequence
  Synthetically generated peptide
  VARIANT (1)..(17): Xaa = Any Amino Acid
CCEXXFACNXPACXTGA

SEQ ID NO: 11563 - protein, 17 aa, Artificial Sequence
  Synthetically generated peptide
  VARIANT (1)..(17): Xaa = Any Amino Acid
CCEXXFACNXPACTXGA

SEQ ID NO: 11564 - protein, 17 aa, Artificial Sequence
  Synthetically generated peptide
  VARIANT (1)..(17): Xaa = Any Amino Acid
CCEXXFACNXPACTGXA

SEQ ID NO: 11565 - protein, 16 aa, Artificial Sequence
  Synthetically generated peptide
  VARIANT (1)..(16): Xaa = Any Amino Acid
CCEXXFACNPXACTGA

SEQ ID NO: 11566 - protein, 17 aa, Artificial Sequence
  Synthetically generated peptide
  VARIANT (1)..(17): Xaa = Any Amino Acid
CCEXXFACNPXXACTGA

SEQ ID NO: 11567 - protein, 17 aa, Artificial Sequence
  Synthetically generated peptide
  VARIANT (1)..(17): Xaa = Any Amino Acid
CCEXXFACNPXAXCTGA

SEQ ID NO: 11568 - protein, 17 aa, Artificial Sequence
  Synthetically generated peptide
  VARIANT (1)..(17): Xaa = Any Amino Acid
CCEXXFACNPXACXTGA

SEQ ID NO: 11569 - protein, 17 aa, Artificial Sequence
  Synthetically generated peptide
  VARIANT (1)..(17): Xaa = Any Amino Acid
CCEXXFACNPXACTXGA

SEQ ID NO: 11570 - protein, 17 aa, Artificial Sequence
  Synthetically generated peptide
  VARIANT (1)..(17): Xaa = Any Amino Acid
CCEXXFACNPXACTGXA

SEQ ID NO: 11571 - protein, 16 aa, Artificial Sequence
  Synthetically generated peptide
  VARIANT (1)..(16): Xaa = Any Amino Acid
CCEXXFACNPAXCTGA

SEQ ID NO: 11572 - protein, 17 aa, Artificial Sequence
  Synthetically generated peptide
  VARIANT (1)..(17): Xaa = Any Amino Acid
CCEXXFACNPAXXCTGA

SEQ ID NO: 11573 - protein, 17 aa, Artificial Sequence
  Synthetically generated peptide
  VARIANT (1)..(17): Xaa = Any Amino Acid
CCEXXFACNPAXCXTGA

SEQ ID NO: 11574 - protein, 17 aa, Artificial Sequence
  Synthetically generated peptide
  VARIANT (1)..(17): Xaa = Any Amino Acid
CCEXXFACNPAXCTXGA

SEQ ID NO: 11575 - protein, 17 aa, Artificial Sequence
  Synthetically generated peptide
  VARIANT (1)..(17): Xaa = Any Amino Acid
CCEXXFACNPAXCTGXA

SEQ ID NO: 11576 - protein, 16 aa, Artificial Sequence
  Synthetically generated peptide
  VARIANT (1)..(16): Xaa = Any Amino Acid
CCEXXFACNPACXTGA

SEQ ID NO: 11577 - protein, 17 aa, Artificial Sequence
  Synthetically generated peptide
  VARIANT (1)..(17): Xaa = Any Amino Acid
CCEXXFACNPACXXTGA

SEQ ID NO: 11578 - protein, 17 aa, Artificial Sequence
  Synthetically generated peptide
  VARIANT (1)..(17): Xaa = Any Amino Acid
CCEXXFACNPACXTXGA

SEQ ID NO: 11579 - protein, 17 aa, Artificial Sequence
  Synthetically generated peptide
  VARIANT (1)..(17): Xaa = Any Amino Acid
CCEXXFACNPACXTGXA

SEQ ID NO: 11580 - protein, 16 aa, Artificial Sequence
  Synthetically generated peptide
  VARIANT (1)..(16): Xaa = Any Amino Acid
CCEXXFACNPACTXGA

SEQ ID NO: 11581 - protein, 17 aa, Artificial Sequence
  Synthetically generated peptide
  VARIANT (1)..(17): Xaa = Any Amino Acid
CCEXXFACNPACTXXGA

SEQ ID NO: 11582 - protein, 17 aa, Artificial Sequence
  Synthetically generated peptide
  VARIANT (1)..(17): Xaa = Any Amino Acid
CCEXXFACNPACTXGXA

SEQ ID NO: 11583 - protein, 16 aa, Artificial Sequence
  Synthetically generated peptide
  VARIANT (1)..(16): Xaa = Any Amino Acid
CCEXXFACNPACTGXA

SEQ ID NO: 11584 - protein, 17 aa, Artificial Sequence
  Synthetically generated peptide
  VARIANT (1)..(17): Xaa = Any Amino Acid
CCEXXFACNPACTGXXA

SEQ ID NO: 11585 - protein, 15 aa, Artificial Sequence
  Synthetically generated peptide
  VARIANT (1)..(15): Xaa = Any Amino Acid
CCEXFXACNPACTGA

SEQ ID NO: 11586 - protein, 16 aa, Artificial Sequence
  Synthetically generated peptide
  VARIANT (1)..(16): Xaa = Any Amino Acid
CCEXFXXACNPACTGA

SEQ ID NO: 11587 - protein, 17 aa, Artificial Sequence
  Synthetically generated peptide
  VARIANT (1)..(17): Xaa = Any Amino Acid
CCEXFXXXACNPACTGA

SEQ ID NO: 11588 - protein, 17 aa, Artificial Sequence
  Synthetically generated peptide
  VARIANT (1)..(17): Xaa = Any Amino Acid
CCEXFXXACXNPACTGA

SEQ ID NO: 11589 - protein, 17 aa, Artificial Sequence
  Synthetically generated peptide
  VARIANT (1)..(17): Xaa = Any Amino Acid
CCEXFXXACNXPACTGA

SEQ ID NO: 11590 - protein, 17 aa, Artificial Sequence
  Synthetically generated peptide
  VARIANT (1)..(17): Xaa = Any Amino Acid
CCEXFXXACNPXACTGA

SEQ ID NO: 11591 - protein, 17 aa, Artificial Sequence
  Synthetically generated peptide
  VARIANT (1)..(17): Xaa = Any Amino Acid
CCEXFXXACNPAXCTGA

SEQ ID NO: 11592 - protein, 17 aa, Artificial Sequence
  Synthetically generated peptide
  VARIANT (1)..(17): Xaa = Any Amino Acid
CCEXFXXACNPACXTGA

SEQ ID NO: 11593 - protein, 17 aa, Artificial Sequence
  Synthetically generated peptide
  VARIANT (1)..(17): Xaa = Any Amino Acid
CCEXFXXACNPACTXGA

SEQ ID NO: 11594 - protein, 17 aa, Artificial Sequence
  Synthetically generated peptide
  VARIANT (1)..(17): Xaa = Any Amino Acid
CCEXFXXACNPACTGXA

SEQ ID NO: 11595 - protein, 16 aa, Artificial Sequence
  Synthetically generated peptide
  VARIANT (1)..(16): Xaa = Any Amino Acid
CCEXFXACXNPACTGA

SEQ ID NO: 11596 - protein, 17 aa, Artificial Sequence
  Synthetically generated peptide
  VARIANT (1)..(17): Xaa = Any Amino Acid
CCEXFXACXXNPACTGA

SEQ ID NO: 11597 - protein, 17 aa, Artificial Sequence
  Synthetically generated peptide
  VARIANT (1)..(17): Xaa = Any Amino Acid
CCEXFXACXNXPACTGA

SEQ ID NO: 11598 - protein, 17 aa, Artificial Sequence
  Synthetically generated peptide
  VARIANT (1)..(17): Xaa = Any Amino Acid
CCEXFXACXNPXACTGA

SEQ ID NO: 11599 - protein, 17 aa, Artificial Sequence
  Synthetically generated peptide
  VARIANT (1)..(17): Xaa = Any Amino Acid
CCEXFXACXNPAXCTGA

SEQ ID NO: 11600 - protein, 17 aa, Artificial Sequence
  Synthetically generated peptide
  VARIANT (1)..(17): Xaa = Any Amino Acid
CCEXFXACXNPACXTGA

SEQ ID NO: 11601 - protein, 17 aa, Artificial Sequence
  Synthetically generated peptide
  VARIANT (1)..(17): Xaa = Any Amino Acid
CCEXFXACXNPACTXGA

SEQ ID NO: 11602 - protein, 17 aa, Artificial Sequence
  Synthetically generated peptide
  VARIANT (1)..(17): Xaa = Any Amino Acid
CCEXFXACXNPACTGXA

SEQ ID NO: 11603 - protein, 16 aa, Artificial Sequence
  Synthetically generated peptide
  VARIANT (1)..(16): Xaa = Any Amino Acid
CCEXFXACNXPACTGA

SEQ ID NO: 11604 - protein, 17 aa, Artificial Sequence
  Synthetically generated peptide
  VARIANT (1)..(17): Xaa = Any Amino Acid
CCEXFXACNXXPACTGA

SEQ ID NO: 11605 - protein, 17 aa, Artificial Sequence
  Synthetically generated peptide
  VARIANT (1)..(17): Xaa = Any Amino Acid
CCEXFXACNXPXACTGA

SEQ ID NO: 11606 - protein, 17 aa, Artificial Sequence
  Synthetically generated peptide
  VARIANT (1)..(17): Xaa = Any Amino Acid
CCEXFXACNXPAXCTGA

SEQ ID NO: 11607 - protein, 17 aa, Artificial Sequence
  Synthetically generated peptide
  VARIANT (1)..(17): Xaa = Any Amino Acid
CCEXFXACNXPACXTGA

SEQ ID NO: 11608 - protein, 17 aa, Artificial Sequence
  Synthetically generated peptide
  VARIANT (1)..(17): Xaa = Any Amino Acid
CCEXFXACNXPACTXGA

SEQ ID NO: 11609 - protein, 17 aa, Artificial Sequence
  Synthetically generated peptide
  VARIANT (1)..(17): Xaa = Any Amino Acid
CCEXFXACNXPACTGXA

SEQ ID NO: 11610 - protein, 16 aa, Artificial Sequence
  Synthetically generated peptide
  VARIANT (1)..(16): Xaa = Any Amino Acid
CCEXFXACNPXACTGA

SEQ ID NO: 11611 - protein, 17 aa, Artificial Sequence
  Synthetically generated peptide
  VARIANT (1)..(17): Xaa = Any Amino Acid
CCEXFXACNPXXACTGA

SEQ ID NO: 11612 - protein, 17 aa, Artificial Sequence
  Synthetically generated peptide
  VARIANT (1)..(17): Xaa = Any Amino Acid
CCEXFXACNPXAXCTGA

SEQ ID NO: 11613 - protein, 17 aa, Artificial Sequence
  Synthetically generated peptide
  VARIANT (1)..(17): Xaa = Any Amino Acid
CCEXFXACNPXACXTGA

SEQ ID NO: 11614 - protein, 17 aa, Artificial Sequence
  Synthetically generated peptide
  VARIANT (1)..(17): Xaa = Any Amino Acid
CCEXFXACNPXACTXGA

SEQ ID NO: 11615 - protein, 17 aa, Artificial Sequence
  Synthetically generated peptide
  VARIANT (1)..(17): Xaa = Any Amino Acid
CCEXFXACNPXACTGXA

SEQ ID NO: 11616 - protein, 16 aa, Artificial Sequence
  Synthetically generated peptide
  VARIANT (1)..(16): Xaa = Any Amino Acid
CCEXFXACNPAXCTGA

SEQ ID NO: 11617 - protein, 17 aa, Artificial Sequence
  Synthetically generated peptide
  VARIANT (1)..(17): Xaa = Any Amino Acid
CCEXFXACNPAXXCTGA

SEQ ID NO: 11618 - protein, 17 aa, Artificial Sequence
  Synthetically generated peptide
  VARIANT (1)..(17): Xaa = Any Amino Acid
CCEXFXACNPAXCXTGA

SEQ ID NO: 11619 - protein, 17 aa, Artificial Sequence
  Synthetically generated peptide
  VARIANT (1)..(17): Xaa = Any Amino Acid
CCEXFXACNPAXCTXGA

SEQ ID NO: 11620 - protein, 17 aa, Artificial Sequence
  Synthetically generated peptide
  VARIANT (1)..(17): Xaa = Any Amino Acid
CCEXFXACNPAXCTGXA

SEQ ID NO: 11621 - protein, 16 aa, Artificial Sequence
  Synthetically generated peptide
  VARIANT (1)..(16): Xaa = Any Amino Acid
CCEXFXACNPACXTGA

SEQ ID NO: 11622 - protein, 17 aa, Artificial Sequence
  Synthetically generated peptide
  VARIANT (1)..(17): Xaa = Any Amino Acid
CCEXFXACNPACXXTGA

SEQ ID NO: 11623 - protein, 17 aa, Artificial Sequence
  Synthetically generated peptide
  VARIANT (1)..(17): Xaa = Any Amino Acid
CCEXFXACNPACXTXGA

SEQ ID NO: 11624 - protein, 17 aa, Artificial Sequence
  Synthetically generated peptide
  VARIANT (1)..(17): Xaa = Any Amino Acid
CCEXFXACNPACXTGXA

SEQ ID NO: 11625 - protein, 16 aa, Artificial Sequence
  Synthetically generated peptide
  VARIANT (1)..(16): Xaa = Any Amino Acid
CCEXFXACNPACTXGA

SEQ ID NO: 11626 - protein, 17 aa, Artificial Sequence
  Synthetically generated peptide
  VARIANT (1)..(17): Xaa = Any Amino Acid
CCEXFXACNPACTXXGA

SEQ ID NO: 11627 - protein, 17 aa, Artificial Sequence
  Synthetically generated peptide
  VARIANT (1)..(17): Xaa = Any Amino Acid
CCEXFXACNPACTXGXA

SEQ ID NO: 11628 - protein, 16 aa, Artificial Sequence
  Synthetically generated peptide
  VARIANT (1)..(16): Xaa = Any Amino Acid
CCEXFXACNPACTGXA

SEQ ID NO: 11629 - protein, 17 aa, Artificial Sequence
  Synthetically generated peptide
  VARIANT (1)..(17): Xaa = Any Amino Acid
CCEXFXACNPACTGXXA

SEQ ID NO: 11630 - protein, 15 aa, Artificial Sequence
  Synthetically generated peptide
  VARIANT (1)..(15): Xaa = Any Amino Acid
CCEXFACXNPACTGA

SEQ ID NO: 11631 - protein, 16 aa, Artificial Sequence
  Synthetically generated peptide
  VARIANT (1)..(16): Xaa = Any Amino Acid
CCEXFACXXNPACTGA

SEQ ID NO: 11632 - protein, 17 aa, Artificial Sequence
  Synthetically generated peptide
  VARIANT (1)..(17): Xaa = Any Amino Acid
CCEXFACXXXNPACTGA

SEQ ID NO: 11633 - protein, 17 aa, Artificial Sequence
  Synthetically generated peptide
  VARIANT (1)..(17): Xaa = Any Amino Acid
CCEXFACXXNXPACTGA

SEQ ID NO: 11634 - protein, 17 aa, Artificial Sequence
  Synthetically generated peptide
  VARIANT (1)..(17): Xaa = Any Amino Acid
CCEXFACXXNPXACTGA

SEQ ID NO: 11635 - protein, 17 aa, Artificial Sequence
  Synthetically generated peptide
  VARIANT (1)..(17): Xaa = Any Amino Acid
CCEXFACXXNPAXCTGA

SEQ ID NO: 11636 - protein, 17 aa, Artificial Sequence
  Synthetically generated peptide
  VARIANT (1)..(17): Xaa = Any Amino Acid
CCEXFACXXNPACXTGA

SEQ ID NO: 11637 - protein, 17 aa, Artificial Sequence
  Synthetically generated peptide
  VARIANT (1)..(17): Xaa = Any Amino Acid
CCEXFACXXNPACTXGA

SEQ ID NO: 11638 - protein, 17 aa, Artificial Sequence
  Synthetically generated peptide
  VARIANT (1)..(17): Xaa = Any Amino Acid
CCEXFACXXNPACTGXA

SEQ ID NO: 11639 - protein, 16 aa, Artificial Sequence
  Synthetically generated peptide
  VARIANT (1)..(16): Xaa = Any Amino Acid
CCEXFACXNXPACTGA

SEQ ID NO: 11640 - protein, 17 aa, Artificial Sequence
  Synthetically generated peptide
  VARIANT (1)..(17): Xaa = Any Amino Acid
CCEXFACXNXXPACTGA

SEQ ID NO: 11641 - protein, 17 aa, Artificial Sequence
  Synthetically generated peptide
  VARIANT (1)..(17): Xaa = Any Amino Acid
CCEXFACXNXPXACTGA

SEQ ID NO: 11642 - protein, 17 aa, Artificial Sequence
  Synthetically generated peptide
  VARIANT (1)..(17): Xaa = Any Amino Acid
CCEXFACXNXPAXCTGA

SEQ ID NO: 11643 - protein, 17 aa, Artificial Sequence
  Synthetically generated peptide
  VARIANT (1)..(17): Xaa = Any Amino Acid
CCEXFACXNXPACXTGA

SEQ ID NO: 11644 - protein, 17 aa, Artificial Sequence
  Synthetically generated peptide
  VARIANT (1)..(17): Xaa = Any Amino Acid
CCEXFACXNXPACTXGA

SEQ ID NO: 11645 - protein, 17 aa, Artificial Sequence
  Synthetically generated peptide
  VARIANT (1)..(17): Xaa = Any Amino Acid
CCEXFACXNXPACTGXA

SEQ ID NO: 11646 - protein, 16 aa, Artificial Sequence
  Synthetically generated peptide
  VARIANT (1)..(16): Xaa = Any Amino Acid
CCEXFACXNPXACTGA

SEQ ID NO: 11647 - protein, 17 aa, Artificial Sequence
  Synthetically generated peptide
  VARIANT (1)..(17): Xaa = Any Amino Acid
CCEXFACXNPXXACTGA

SEQ ID NO: 11648 - protein, 17 aa, Artificial Sequence
  Synthetically generated peptide
  VARIANT (1)..(17): Xaa = Any Amino Acid
CCEXFACXNPXAXCTGA

SEQ ID NO: 11649 - protein, 17 aa, Artificial Sequence
  Synthetically generated peptide
  VARIANT (1)..(17): Xaa = Any Amino Acid
CCEXFACXNPXACXTGA

SEQ ID NO: 11650 - protein, 17 aa, Artificial Sequence
  Synthetically generated peptide
  VARIANT (1)..(17): Xaa = Any Amino Acid
CCEXFACXNPXACTXGA

SEQ ID NO: 11651 - protein, 17 aa, Artificial Sequence
  Synthetically generated peptide
  VARIANT (1)..(17): Xaa = Any Amino Acid
CCEXFACXNPXACTGXA

SEQ ID NO: 11652 - protein, 16 aa, Artificial Sequence
  Synthetically generated peptide
  VARIANT (1)..(16): Xaa = Any Amino Acid
CCEXFACXNPAXCTGA

SEQ ID NO: 11653 - protein, 17 aa, Artificial Sequence
  Synthetically generated peptide
  VARIANT (1)..(17): Xaa = Any Amino Acid
CCEXFACXNPAXXCTGA

SEQ ID NO: 11654 - protein, 17 aa, Artificial Sequence
  Synthetically generated peptide
  VARIANT (1)..(17): Xaa = Any Amino Acid
CCEXFACXNPAXCXTGA

SEQ ID NO: 11655 - protein, 17 aa, Artificial Sequence
  Synthetically generated peptide
  VARIANT (1)..(17): Xaa = Any Amino Acid
CCEXFACXNPAXCTXGA

SEQ ID NO: 11656 - protein, 17 aa, Artificial Sequence
  Synthetically generated peptide
  VARIANT (1)..(17): Xaa = Any Amino Acid
CCEXFACXNPAXCTGXA

SEQ ID NO: 11657 - protein, 16 aa, Artificial Sequence
  Synthetically generated peptide
  VARIANT (1)..(16): Xaa = Any Amino Acid
CCEXFACXNPACXTGA

SEQ ID NO: 11658 - protein, 17 aa, Artificial Sequence
  Synthetically generated peptide
  VARIANT (1)..(17): Xaa = Any Amino Acid
CCEXFACXNPACXXTGA

SEQ ID NO: 11659 - protein, 17 aa, Artificial Sequence
  Synthetically generated peptide
  VARIANT (1)..(17): Xaa = Any Amino Acid
CCEXFACXNPACXTXGA

SEQ ID NO: 11660 - protein, 17 aa, Artificial Sequence
  Synthetically generated peptide
  VARIANT (1)..(17): Xaa = Any Amino Acid
CCEXFACXNPACXTGXA

SEQ ID NO: 11661 - protein, 16 aa, Artificial Sequence
  Synthetically generated peptide
  VARIANT (1)..(16): Xaa = Any Amino Acid
CCEXFACXNPACTXGA

SEQ ID NO: 11662 - protein, 17 aa, Artificial Sequence
  Synthetically generated peptide
  VARIANT (1)..(17): Xaa = Any Amino Acid
CCEXFACXNPACTXXGA

SEQ ID NO: 11663 - protein, 17 aa, Artificial Sequence
  Synthetically generated peptide
  VARIANT (1)..(17): Xaa = Any Amino Acid
CCEXFACXNPACTXGXA

SEQ ID NO: 11664 - protein, 16 aa, Artificial Sequence
  Synthetically generated peptide
  VARIANT (1)..(16): Xaa = Any Amino Acid
CCEXFACXNPACTGXA

SEQ ID NO: 11665 - protein, 17 aa, Artificial Sequence
  Synthetically generated peptide
  VARIANT (1)..(17): Xaa = Any Amino Acid
CCEXFACXNPACTGXXA

SEQ ID NO: 11666 - protein, 15 aa, Artificial Sequence
  Synthetically generated peptide
  VARIANT (1)..(15): Xaa = Any Amino Acid
CCEXFACNXPACTGA

SEQ ID NO: 11667 - protein, 16 aa, Artificial Sequence
  Synthetically generated peptide
  VARIANT (1)..(16): Xaa = Any Amino Acid
CCEXFACNXXPACTGA

SEQ ID NO: 11668 - protein, 17 aa, Artificial Sequence
  Synthetically generated peptide
  VARIANT (1)..(17): Xaa = Any Amino Acid
CCEXFACNXXXPACTGA

SEQ ID NO: 11669 - protein, 17 aa, Artificial Sequence
  Synthetically generated peptide
  VARIANT (1)..(17): Xaa = Any Amino Acid
CCEXFACNXXPXACTGA

SEQ ID NO: 11670 - protein, 17 aa, Artificial Sequence
  Synthetically generated peptide
  VARIANT (1)..(17): Xaa = Any Amino Acid
CCEXFACNXXPAXCTGA

SEQ ID NO: 11671 - protein, 17 aa, Artificial Sequence
  Synthetically generated peptide
  VARIANT (1)..(17): Xaa = Any Amino Acid
CCEXFACNXXPACXTGA

SEQ ID NO: 11672 - protein, 17 aa, Artificial Sequence
  Synthetically generated peptide
  VARIANT (1)..(17): Xaa = Any Amino Acid
CCEXFACNXXPACTXGA

SEQ ID NO: 11673 - protein, 17 aa, Artificial Sequence
  Synthetically generated peptide
  VARIANT (1)..(17): Xaa = Any Amino Acid
CCEXFACNXXPACTGXA

SEQ ID NO: 11674 - protein, 16 aa, Artificial Sequence
  Synthetically generated peptide
  VARIANT (1)..(16): Xaa = Any Amino Acid
CCEXFACNXPXACTGA

SEQ ID NO: 11675 - protein, 17 aa, Artificial Sequence
  Synthetically generated peptide
  VARIANT (1)..(17): Xaa = Any Amino Acid
CCEXFACNXPXXACTGA

SEQ ID NO: 11676 - protein, 17 aa, Artificial Sequence
  Synthetically generated peptide
  VARIANT (1)..(17): Xaa = Any Amino Acid
CCEXFACNXPXAXCTGA

SEQ ID NO: 11677 - protein, 17 aa, Artificial Sequence
  Synthetically generated peptide
  VARIANT (1)..(17): Xaa = Any Amino Acid
CCEXFACNXPXACXTGA

SEQ ID NO: 11678 - protein, 17 aa, Artificial Sequence
  Synthetically generated peptide
  VARIANT (1)..(17): Xaa = Any Amino Acid
CCEXFACNXPXACTXGA

SEQ ID NO: 11679 - protein, 17 aa, Artificial Sequence
  Synthetically generated peptide
  VARIANT (1)..(17): Xaa = Any Amino Acid
CCEXFACNXPXACTGXA

SEQ ID NO: 11680 - protein, 16 aa, Artificial Sequence
  Synthetically generated peptide
  VARIANT (1)..(16): Xaa = Any Amino Acid
CCEXFACNXPAXCTGA

SEQ ID NO: 11681 - protein, 17 aa, Artificial Sequence
  Synthetically generated peptide
  VARIANT (1)..(17): Xaa = Any Amino Acid
CCEXFACNXPAXXCTGA

SEQ ID NO: 11682 - protein, 17 aa, Artificial Sequence
  Synthetically generated peptide
  VARIANT (1)..(17): Xaa = Any Amino Acid
CCEXFACNXPAXCXTGA

SEQ ID NO: 11683 - protein, 17 aa, Artificial Sequence
  Synthetically generated peptide
  VARIANT (1)..(17): Xaa = Any Amino Acid
CCEXFACNXPAXCTXGA

SEQ ID NO: 11684 - protein, 17 aa, Artificial Sequence
  Synthetically generated peptide
  VARIANT (1)..(17): Xaa = Any Amino Acid
CCEXFACNXPAXCTGXA

SEQ ID NO: 11685 - protein, 16 aa, Artificial Sequence
  Synthetically generated peptide
  VARIANT (1)..(16): Xaa = Any Amino Acid
CCEXFACNXPACXTGA

SEQ ID NO: 11686 - protein, 17 aa, Artificial Sequence
  Synthetically generated peptide
  VARIANT (1)..(17): Xaa = Any Amino Acid
CCEXFACNXPACXXTGA

SEQ ID NO: 11687 - protein, 17 aa, Artificial Sequence
  Synthetically generated peptide
  VARIANT (1)..(17): Xaa = Any Amino Acid
CCEXFACNXPACXTXGA

SEQ ID NO: 11688 - protein, 17 aa, Artificial Sequence
  Synthetically generated peptide
  VARIANT (1)..(17): Xaa = Any Amino Acid
CCEXFACNXPACXTGXA

SEQ ID NO: 11689 - protein, 16 aa, Artificial Sequence
  Synthetically generated peptide
  VARIANT (1)..(16): Xaa = Any Amino Acid
CCEXFACNXPACTXGA

SEQ ID NO: 11690 - protein, 17 aa, Artificial Sequence
  Synthetically generated peptide
  VARIANT (1)..(17): Xaa = Any Amino Acid
CCEXFACNXPACTXXGA

SEQ ID NO: 11691 - protein, 17 aa, Artificial Sequence
  Synthetically generated peptide
  VARIANT (1)..(17): Xaa = Any Amino Acid
CCEXFACNXPACTXGXA

SEQ ID NO: 11692 - protein, 16 aa, Artificial Sequence
  Synthetically generated peptide
  VARIANT (1)..(16): Xaa = Any Amino Acid
CCEXFACNXPACTGXA

SEQ ID NO: 11693 - protein, 17 aa, Artificial Sequence
  Synthetically generated peptide
  VARIANT (1)..(17): Xaa = Any Amino Acid
CCEXFACNXPACTGXXA

SEQ ID NO: 11694 - protein, 15 aa, Artificial Sequence
  Synthetically generated peptide
  VARIANT (1)..(15): Xaa = Any Amino Acid
CCEXFACNPXACTGA

SEQ ID NO: 11695 - protein, 16 aa, Artificial Sequence
  Synthetically generated peptide
  VARIANT (1)..(16): Xaa = Any Amino Acid
CCEXFACNPXXACTGA

SEQ ID NO: 11696 - protein, 17 aa, Artificial Sequence
  Synthetically generated peptide
  VARIANT (1)..(17): Xaa = Any Amino Acid
CCEXFACNPXXXACTGA

SEQ ID NO: 11697 - protein, 17 aa, Artificial Sequence
  Synthetically generated peptide
  VARIANT (1)..(17): Xaa = Any Amino Acid
CCEXFACNPXXAXCTGA

SEQ ID NO: 11698 - protein, 17 aa, Artificial Sequence
  Synthetically generated peptide
  VARIANT (1)..(17): Xaa = Any Amino Acid
CCEXFACNPXXACXTGA

SEQ ID NO: 11699 - protein, 17 aa, Artificial Sequence
  Synthetically generated peptide
  VARIANT (1)..(17): Xaa = Any Amino Acid
CCEXFACNPXXACTXGA

SEQ ID NO: 11700 - protein, 17 aa, Artificial Sequence
  Synthetically generated peptide
  VARIANT (1)..(17): Xaa = Any Amino Acid
CCEXFACNPXXACTGXA

SEQ ID NO: 11701 - protein, 16 aa, Artificial Sequence
  Synthetically generated peptide
  VARIANT (1)..(16): Xaa = Any Amino Acid
CCEXFACNPXAXCTGA

SEQ ID NO: 11702 - protein, 17 aa, Artificial Sequence
  Synthetically generated peptide
  VARIANT (1)..(17): Xaa = Any Amino Acid
CCEXFACNPXAXXCTGA

SEQ ID NO: 11703 - protein, 17 aa, Artificial Sequence
  Synthetically generated peptide
  VARIANT (1)..(17): Xaa = Any Amino Acid
CCEXFACNPXAXCXTGA

SEQ ID NO: 11704 - protein, 17 aa, Artificial Sequence
  Synthetically generated peptide
  VARIANT (1)..(17): Xaa = Any Amino Acid
CCEXFACNPXAXCTXGA

SEQ ID NO: 11705 - protein, 17 aa, Artificial Sequence
  Synthetically generated peptide
  VARIANT (1)..(17): Xaa = Any Amino Acid
CCEXFACNPXAXCTGXA

SEQ ID NO: 11706 - protein, 16 aa, Artificial Sequence
  Synthetically generated peptide
  VARIANT (1)..(16): Xaa = Any Amino Acid
CCEXFACNPXACXTGA

SEQ ID NO: 11707 - protein, 17 aa, Artificial Sequence
  Synthetically generated peptide
  VARIANT (1)..(17): Xaa = Any Amino Acid
CCEXFACNPXACXXTGA

SEQ ID NO: 11708 - protein, 17 aa, Artificial Sequence
  Synthetically generated peptide
  VARIANT (1)..(17): Xaa = Any Amino Acid
CCEXFACNPXACXTXGA

SEQ ID NO: 11709 - protein, 17 aa, Artificial Sequence
  Synthetically generated peptide
  VARIANT (1)..(17): Xaa = Any Amino Acid
CCEXFACNPXACXTGXA

SEQ ID NO: 11710 - protein, 16 aa, Artificial Sequence
  Synthetically generated peptide
  VARIANT (1)..(16): Xaa = Any Amino Acid
CCEXFACNPXACTXGA

SEQ ID NO: 11711 - protein, 17 aa, Artificial Sequence
  Synthetically generated peptide
  VARIANT (1)..(17): Xaa = Any Amino Acid
CCEXFACNPXACTXXGA

SEQ ID NO: 11712 - protein, 17 aa, Artificial Sequence
  Synthetically generated peptide
  VARIANT (1)..(17): Xaa = Any Amino Acid
CCEXFACNPXACTXGXA

SEQ ID NO: 11713 - protein, 16 aa, Artificial Sequence
  Synthetically generated peptide
  VARIANT (1)..(16): Xaa = Any Amino Acid
CCEXFACNPXACTGXA

SEQ ID NO: 11714 - protein, 17 aa, Artificial Sequence
  Synthetically generated peptide
  VARIANT (1)..(17): Xaa = Any Amino Acid
CCEXFACNPXACTGXXA

SEQ ID NO: 11715 - protein, 15 aa, Artificial Sequence
  Synthetically generated peptide
  VARIANT (1)..(15): Xaa = Any Amino Acid
CCEXFACNPAXCTGA

SEQ ID NO: 11716 - protein, 16 aa, Artificial Sequence
  Synthetically generated peptide
  VARIANT (1)..(16): Xaa = Any Amino Acid
CCEXFACNPAXXCTGA

SEQ ID NO: 11717 - protein, 17 aa, Artificial Sequence
  Synthetically generated peptide
  VARIANT (1)..(17): Xaa = Any Amino Acid
CCEXFACNPAXXXCTGA

SEQ ID NO: 11718 - protein, 17 aa, Artificial Sequence
  Synthetically generated peptide
  VARIANT (1)..(17): Xaa = Any Amino Acid
CCEXFACNPAXXCXTGA

SEQ ID NO: 11719 - protein, 17 aa, Artificial Sequence
  Synthetically generated peptide
  VARIANT (1)..(17): Xaa = Any Amino Acid
CCEXFACNPAXXCTXGA

SEQ ID NO: 11720 - protein, 17 aa, Artificial Sequence
  Synthetically generated peptide
  VARIANT (1)..(17): Xaa = Any Amino Acid
CCEXFACNPAXXCTGXA

SEQ ID NO: 11721 - protein, 16 aa, Artificial Sequence
  Synthetically generated peptide
  VARIANT (1)..(16): Xaa = Any Amino Acid
CCEXFACNPAXCXTGA

SEQ ID NO: 11722 - protein, 17 aa, Artificial Sequence
  Synthetically generated peptide
  VARIANT (1)..(17): Xaa = Any Amino Acid
CCEXFACNPAXCXXTGA

SEQ ID NO: 11723 - protein, 17 aa, Artificial Sequence
  Synthetically generated peptide
  VARIANT (1)..(17): Xaa = Any Amino Acid
CCEXFACNPAXCXTXGA

SEQ ID NO: 11724 - protein, 17 aa, Artificial Sequence
  Synthetically generated peptide
  VARIANT (1)..(17): Xaa = Any Amino Acid
CCEXFACNPAXCXTGXA

SEQ ID NO: 11725 - protein, 16 aa, Artificial Sequence
  Synthetically generated peptide
  VARIANT (1)..(16): Xaa = Any Amino Acid
CCEXFACNPAXCTXGA

SEQ ID NO: 11726 - protein, 17 aa, Artificial Sequence
  Synthetically generated peptide
  VARIANT (1)..(17): Xaa = Any Amino Acid
CCEXFACNPAXCTXXGA

SEQ ID NO: 11727 - protein, 17 aa, Artificial Sequence
  Synthetically generated peptide
  VARIANT (1)..(17): Xaa = Any Amino Acid
CCEXFACNPAXCTXGXA

SEQ ID NO: 11728 - protein, 16 aa, Artificial Sequence
  Synthetically generated peptide
  VARIANT (1)..(16): Xaa = Any Amino Acid
CCEXFACNPAXCTGXA

SEQ ID NO: 11729 - protein, 17 aa, Artificial Sequence
  Synthetically generated peptide
  VARIANT (1)..(17): Xaa = Any Amino Acid
CCEXFACNPAXCTGXXA

SEQ ID NO: 11730 - protein, 15 aa, Artificial Sequence
  Synthetically generated peptide
  VARIANT (1)..(15): Xaa = Any Amino Acid
CCEXFACNPACXTGA

SEQ ID NO: 11731 - protein, 16 aa, Artificial Sequence
  Synthetically generated peptide
  VARIANT (1)..(16): Xaa = Any Amino Acid
CCEXFACNPACXXTGA

SEQ ID NO: 11732 - protein, 17 aa, Artificial Sequence
  Synthetically generated peptide
  VARIANT (1)..(17): Xaa = Any Amino Acid
CCEXFACNPACXXXTGA

SEQ ID NO: 11733 - protein, 17 aa, Artificial Sequence
  Synthetically generated peptide
  VARIANT (1)..(17): Xaa = Any Amino Acid
CCEXFACNPACXXTXGA

SEQ ID NO: 11734 - protein, 17 aa, Artificial Sequence
  Synthetically generated peptide
  VARIANT (1)..(17): Xaa = Any Amino Acid
CCEXFACNPACXXTGXA

SEQ ID NO: 11735 - protein, 16 aa, Artificial Sequence
  Synthetically generated peptide
  VARIANT (1)..(16): Xaa = Any Amino Acid
CCEXFACNPACXTXGA

SEQ ID NO: 11736 - protein, 17 aa, Artificial Sequence
  Synthetically generated peptide
  VARIANT (1)..(17): Xaa = Any Amino Acid
CCEXFACNPACXTXXGA

SEQ ID NO: 11737 - protein, 17 aa, Artificial Sequence
  Synthetically generated peptide
  VARIANT (1)..(17): Xaa = Any Amino Acid
CCEXFACNPACXTXGXA

SEQ ID NO: 11738 - protein, 16 aa, Artificial Sequence
  Synthetically generated peptide
  VARIANT (1)..(16): Xaa = Any Amino Acid
CCEXFACNPACXTGXA

SEQ ID NO: 11739 - protein, 17 aa, Artificial Sequence
  Synthetically generated peptide
  VARIANT (1)..(17): Xaa = Any Amino Acid
CCEXFACNPACXTGXXA

SEQ ID NO: 11740 - protein, 15 aa, Artificial Sequence
  Synthetically generated peptide
  VARIANT (1)..(15): Xaa = Any Amino Acid
CCEXFACNPACTXGA

SEQ ID NO: 11741 - protein, 16 aa, Artificial Sequence
  Synthetically generated peptide
  VARIANT (1)..(16): Xaa = Any Amino Acid
CCEXFACNPACTXXGA

SEQ ID NO: 11742 - protein, 17 aa, Artificial Sequence
  Synthetically generated peptide
  VARIANT (1)..(17): Xaa = Any Amino Acid
CCEXFACNPACTXXXGA

SEQ ID NO: 11743 - protein, 17 aa, Artificial Sequence
  Synthetically generated peptide
  VARIANT (1)..(17): Xaa = Any Amino Acid
CCEXFACNPACTXXGXA

SEQ ID NO: 11744 - protein, 16 aa, Artificial Sequence
  Synthetically generated peptide
  VARIANT (1)..(16): Xaa = Any Amino Acid
CCEXFACNPACTXGXA

SEQ ID NO: 11745 - protein, 17 aa, Artificial Sequence
  Synthetically generated peptide
  VARIANT (1)..(17): Xaa = Any Amino Acid
CCEXFACNPACTXGXXA

SEQ ID NO: 11746 - protein, 15 aa, Artificial Sequence
  Synthetically generated peptide
  VARIANT (1)..(15): Xaa = Any Amino Acid
CCEXFACNPACTGXA

SEQ ID NO: 11747 - protein, 16 aa, Artificial Sequence
  Synthetically generated peptide
  VARIANT (1)..(16): Xaa = Any Amino Acid
CCEXFACNPACTGXXA

SEQ ID NO: 11748 - protein, 17 aa, Artificial Sequence
  Synthetically generated peptide
  VARIANT (1)..(17): Xaa = Any Amino Acid
CCEXFACNPACTGXXXA

SEQ ID NO: 11749 - protein, 14 aa, Artificial Sequence
  Synthetically generated peptide
  VARIANT (1)..(14): Xaa = Any Amino Acid
CCEFXACNPACTGA

SEQ ID NO: 11750 - protein, 15 aa, Artificial Sequence
  Synthetically generated peptide
  VARIANT (1)..(15): Xaa = Any Amino Acid
CCEFXXACNPACTGA

SEQ ID NO: 11751 - protein, 16 aa, Artificial Sequence
  Synthetically generated peptide
  VARIANT (1)..(16): Xaa = Any Amino Acid
CCEFXXXACNPACTGA

SEQ ID NO: 11752 - protein, 17 aa, Artificial Sequence
  Synthetically generated peptide
  VARIANT (1)..(17): Xaa = Any Amino Acid
CCEFXXXXACNPACTGA

SEQ ID NO: 11753 - protein, 17 aa, Artificial Sequence
  Synthetically generated peptide
  VARIANT (1)..(17): Xaa = Any Amino Acid
CCEFXXXACXNPACTGA

SEQ ID NO: 11754 - protein, 17 aa, Artificial Sequence
  Synthetically generated peptide
  VARIANT (1)..(17): Xaa = Any Amino Acid
CCEFXXXACNXPACTGA

SEQ ID NO: 11755 - protein, 17 aa, Artificial Sequence
  Synthetically generated peptide
  VARIANT (1)..(17): Xaa = Any Amino Acid
CCEFXXXACNPXACTGA

SEQ ID NO: 11756 - protein, 17 aa, Artificial Sequence
  Synthetically generated peptide
  VARIANT (1)..(17): Xaa = Any Amino Acid
CCEFXXXACNPAXCTGA

SEQ ID NO: 11757 - protein, 17 aa, Artificial Sequence
  Synthetically generated peptide
  VARIANT (1)..(17): Xaa = Any Amino Acid
CCEFXXXACNPACXTGA

SEQ ID NO: 11758 - protein, 17 aa, Artificial Sequence
  Synthetically generated peptide
  VARIANT (1)..(17): Xaa = Any Amino Acid
CCEFXXXACNPACTXGA

SEQ ID NO: 11759 - protein, 17 aa, Artificial Sequence
  Synthetically generated peptide
  VARIANT (1)..(17): Xaa = Any Amino Acid
CCEFXXXACNPACTGXA

SEQ ID NO: 11760 - protein, 16 aa, Artificial Sequence
  Synthetically generated peptide
  VARIANT (1)..(16): Xaa = Any Amino Acid
CCEFXXACXNPACTGA

SEQ ID NO: 11761 - protein, 17 aa, Artificial Sequence
  Synthetically generated peptide
  VARIANT (1)..(17): Xaa = Any Amino Acid
CCEFXXACXXNPACTGA

SEQ ID NO: 11762 - protein, 17 aa, Artificial Sequence
  Synthetically generated peptide
  VARIANT (1)..(17): Xaa = Any Amino Acid
CCEFXXACXNXPACTGA

SEQ ID NO: 11763 - protein, 17 aa, Artificial Sequence
  Synthetically generated peptide
  VARIANT (1)..(17): Xaa = Any Amino Acid
CCEFXXACXNPXACTGA

SEQ ID NO: 11764 - protein, 17 aa, Artificial Sequence
  Synthetically generated peptide
  VARIANT (1)..(17): Xaa = Any Amino Acid
CCEFXXACXNPAXCTGA

SEQ ID NO: 11765 - protein, 17 aa, Artificial Sequence
  Synthetically generated peptide
  VARIANT (1)..(17): Xaa = Any Amino Acid
CCEFXXACXNPACXTGA

SEQ ID NO: 11766 - protein, 17 aa, Artificial Sequence
  Synthetically generated peptide
  VARIANT (1)..(17): Xaa = Any Amino Acid
CCEFXXACXNPACTXGA

SEQ ID NO: 11767 - protein, 17 aa, Artificial Sequence
  Synthetically generated peptide
  VARIANT (1)..(17): Xaa = Any Amino Acid
CCEFXXACXNPACTGXA

SEQ ID NO: 11768 - protein, 16 aa, Artificial Sequence
  Synthetically generated peptide
  VARIANT (1)..(16): Xaa = Any Amino Acid
CCEFXXACNXPACTGA

SEQ ID NO: 11769 - protein, 17 aa, Artificial Sequence
  Synthetically generated peptide
  VARIANT (1)..(17): Xaa = Any Amino Acid
CCEFXXACNXXPACTGA

SEQ ID NO: 11770 - protein, 17 aa, Artificial Sequence
  Synthetically generated peptide
  VARIANT (1)..(17): Xaa = Any Amino Acid
CCEFXXACNXPXACTGA

SEQ ID NO: 11771 - protein, 17 aa, Artificial Sequence
  Synthetically generated peptide
  VARIANT (1)..(17): Xaa = Any Amino Acid
CCEFXXACNXPAXCTGA

SEQ ID NO: 11772 - protein, 17 aa, Artificial Sequence
  Synthetically generated peptide
  VARIANT (1)..(17): Xaa = Any Amino Acid
CCEFXXACNXPACXTGA

SEQ ID NO: 11773 - protein, 17 aa, Artificial Sequence
  Synthetically generated peptide
  VARIANT (1)..(17): Xaa = Any Amino Acid
CCEFXXACNXPACTXGA

SEQ ID NO: 11774 - protein, 17 aa, Artificial Sequence
  Synthetically generated peptide
  VARIANT (1)..(17): Xaa = Any Amino Acid
CCEFXXACNXPACTGXA

SEQ ID NO: 11775 - protein, 16 aa, Artificial Sequence
  Synthetically generated peptide
  VARIANT (1)..(16): Xaa = Any Amino Acid
CCEFXXACNPXACTGA

SEQ ID NO: 11776 - protein, 17 aa, Artificial Sequence
  Synthetically generated peptide
  VARIANT (1)..(17): Xaa = Any Amino Acid
CCEFXXACNPXXACTGA

SEQ ID NO: 11777 - protein, 17 aa, Artificial Sequence
  Synthetically generated peptide
  VARIANT (1)..(17): Xaa = Any Amino Acid
CCEFXXACNPXAXCTGA

SEQ ID NO: 11778 - protein, 17 aa, Artificial Sequence
  Synthetically generated peptide
  VARIANT (1)..(17): Xaa = Any Amino Acid
CCEFXXACNPXACXTGA

SEQ ID NO: 11779 - protein, 17 aa, Artificial Sequence
  Synthetically generated peptide
  VARIANT (1)..(17): Xaa = Any Amino Acid
CCEFXXACNPXACTXGA

SEQ ID NO: 11780 - protein, 17 aa, Artificial Sequence
  Synthetically generated peptide
  VARIANT (1)..(17): Xaa = Any Amino Acid
CCEFXXACNPXACTGXA

SEQ ID NO: 11781 - protein, 16 aa, Artificial Sequence
  Synthetically generated peptide
  VARIANT (1)..(16): Xaa = Any Amino Acid
CCEFXXACNPAXCTGA

SEQ ID NO: 11782 - protein, 17 aa, Artificial Sequence
  Synthetically generated peptide
  VARIANT (1)..(17): Xaa = Any Amino Acid
CCEFXXACNPAXXCTGA

SEQ ID NO: 11783 - protein, 17 aa, Artificial Sequence
  Synthetically generated peptide
  VARIANT (1)..(17): Xaa = Any Amino Acid
CCEFXXACNPAXCXTGA

SEQ ID NO: 11784 - protein, 17 aa, Artificial Sequence
  Synthetically generated peptide
  VARIANT (1)..(17): Xaa = Any Amino Acid
CCEFXXACNPAXCTXGA

SEQ ID NO: 11785 - protein, 17 aa, Artificial Sequence
  Synthetically generated peptide
  VARIANT (1)..(17): Xaa = Any Amino Acid
CCEFXXACNPAXCTGXA

SEQ ID NO: 11786 - protein, 16 aa, Artificial Sequence
  Synthetically generated peptide
  VARIANT (1)..(16): Xaa = Any Amino Acid
CCEFXXACNPACXTGA

SEQ ID NO: 11787 - protein, 17 aa, Artificial Sequence
  Synthetically generated peptide
  VARIANT (1)..(17): Xaa = Any Amino Acid
CCEFXXACNPACXXTGA

SEQ ID NO: 11788 - protein, 17 aa, Artificial Sequence
  Synthetically generated peptide
  VARIANT (1)..(17): Xaa = Any Amino Acid
CCEFXXACNPACXTXGA

SEQ ID NO: 11789 - protein, 17 aa, Artificial Sequence
  Synthetically generated peptide
  VARIANT (1)..(17): Xaa = Any Amino Acid
CCEFXXACNPACXTGXA

SEQ ID NO: 11790 - protein, 16 aa, Artificial Sequence
  Synthetically generated peptide
  VARIANT (1)..(16): Xaa = Any Amino Acid
CCEFXXACNPACTXGA

SEQ ID NO: 11791 - protein, 17 aa, Artificial Sequence
  Synthetically generated peptide
  VARIANT (1)..(17): Xaa = Any Amino Acid
CCEFXXACNPACTXXGA

SEQ ID NO: 11792 - protein, 17 aa, Artificial Sequence
  Synthetically generated peptide
  VARIANT (1)..(17): Xaa = Any Amino Acid
CCEFXXACNPACTXGXA

SEQ ID NO: 11793 - protein, 16 aa, Artificial Sequence
  Synthetically generated peptide
  VARIANT (1)..(16): Xaa = Any Amino Acid
CCEFXXACNPACTGXA

SEQ ID NO: 11794 - protein, 17 aa, Artificial Sequence
  Synthetically generated peptide
  VARIANT (1)..(17): Xaa = Any Amino Acid
CCEFXXACNPACTGXXA

SEQ ID NO: 11795 - protein, 15 aa, Artificial Sequence
  Synthetically generated peptide
  VARIANT (1)..(15): Xaa = Any Amino Acid
CCEFXACXNPACTGA

SEQ ID NO: 11796 - protein, 16 aa, Artificial Sequence
  Synthetically generated peptide
  VARIANT (1)..(16): Xaa = Any Amino Acid
CCEFXACXXNPACTGA

SEQ ID NO: 11797 - protein, 17 aa, Artificial Sequence
  Synthetically generated peptide
  VARIANT (1)..(17): Xaa = Any Amino Acid
CCEFXACXXXNPACTGA

SEQ ID NO: 11798 - protein, 17 aa, Artificial Sequence
  Synthetically generated peptide
  VARIANT (1)..(17): Xaa = Any Amino Acid
CCEFXACXXNXPACTGA

SEQ ID NO: 11799 - protein, 17 aa, Artificial Sequence
  Synthetically generated peptide
  VARIANT (1)..(17): Xaa = Any Amino Acid
CCEFXACXXNPXACTGA

SEQ ID NO: 11800 - protein, 17 aa, Artificial Sequence
  Synthetically generated peptide
  VARIANT (1)..(17): Xaa = Any Amino Acid
CCEFXACXXNPAXCTGA

SEQ ID NO: 11801 - protein, 17 aa, Artificial Sequence
  Synthetically generated peptide
  VARIANT (1)..(17): Xaa = Any Amino Acid
CCEFXACXXNPACXTGA

SEQ ID NO: 11802 - protein, 17 aa, Artificial Sequence
  Synthetically generated peptide
  VARIANT (1)..(17): Xaa = Any Amino Acid
CCEFXACXXNPACTXGA

SEQ ID NO: 11803 - protein, 17 aa, Artificial Sequence
  Synthetically generated peptide
  VARIANT (1)..(17): Xaa = Any Amino Acid
CCEFXACXXNPACTGXA

SEQ ID NO: 11804 - protein, 16 aa, Artificial Sequence
  Synthetically generated peptide
  VARIANT (1)..(16): Xaa = Any Amino Acid
CCEFXACXNXPACTGA

SEQ ID NO: 11805 - protein, 17 aa, Artificial Sequence
  Synthetically generated peptide
  VARIANT (1)..(17): Xaa = Any Amino Acid
CCEFXACXNXXPACTGA

SEQ ID NO: 11806 - protein, 17 aa, Artificial Sequence
  Synthetically generated peptide
  VARIANT (1)..(17): Xaa = Any Amino Acid
CCEFXACXNXPXACTGA

SEQ ID NO: 11807 - protein, 17 aa, Artificial Sequence
  Synthetically generated peptide
  VARIANT (1)..(17): Xaa = Any Amino Acid
CCEFXACXNXPAXCTGA

SEQ ID NO: 11808 - protein, 17 aa, Artificial Sequence
  Synthetically generated peptide
  VARIANT (1)..(17): Xaa = Any Amino Acid
CCEFXACXNXPACXTGA

SEQ ID NO: 11809 - protein, 17 aa, Artificial Sequence
  Synthetically generated peptide
  VARIANT (1)..(17): Xaa = Any Amino Acid
CCEFXACXNXPACTXGA

SEQ ID NO: 11810 - protein, 17 aa, Artificial Sequence
  Synthetically generated peptide
  VARIANT (1)..(17): Xaa = Any Amino Acid
CCEFXACXNXPACTGXA

SEQ ID NO: 11811 - protein, 16 aa, Artificial Sequence
  Synthetically generated peptide
  VARIANT (1)..(16): Xaa = Any Amino Acid
CCEFXACXNPXACTGA

SEQ ID NO: 11812 - protein, 17 aa, Artificial Sequence
  Synthetically generated peptide
  VARIANT (1)..(17): Xaa = Any Amino Acid
CCEFXACXNPXXACTGA

SEQ ID NO: 11813 - protein, 17 aa, Artificial Sequence
  Synthetically generated peptide
  VARIANT (1)..(17): Xaa = Any Amino Acid
CCEFXACXNPXAXCTGA

SEQ ID NO: 11814 - protein, 17 aa, Artificial Sequence
  Synthetically generated peptide
  VARIANT (1)..(17): Xaa = Any Amino Acid
CCEFXACXNPXACXTGA

SEQ ID NO: 11815 - protein, 17 aa, Artificial Sequence
  Synthetically generated peptide
  VARIANT (1)..(17): Xaa = Any Amino Acid
CCEFXACXNPXACTXGA

SEQ ID NO: 11816 - protein, 17 aa, Artificial Sequence
  Synthetically generated peptide
  VARIANT (1)..(17): Xaa = Any Amino Acid
CCEFXACXNPXACTGXA

SEQ ID NO: 11817 - protein, 16 aa, Artificial Sequence
  Synthetically generated peptide
  VARIANT (1)..(16): Xaa = Any Amino Acid
CCEFXACXNPAXCTGA

SEQ ID NO: 11818 - protein, 17 aa, Artificial Sequence
  Synthetically generated peptide
  VARIANT (1)..(17): Xaa = Any Amino Acid
CCEFXACXNPAXXCTGA

SEQ ID NO: 11819 - protein, 17 aa, Artificial Sequence
  Synthetically generated peptide
  VARIANT (1)..(17): Xaa = Any Amino Acid
CCEFXACXNPAXCXTGA

SEQ ID NO: 11820 - protein, 17 aa, Artificial Sequence
  Synthetically generated peptide
  VARIANT (1)..(17): Xaa = Any Amino Acid
CCEFXACXNPAXCTXGA

SEQ ID NO: 11821 - protein, 17 aa, Artificial Sequence
  Synthetically generated peptide
  VARIANT (1)..(17): Xaa = Any Amino Acid
CCEFXACXNPAXCTGXA

SEQ ID NO: 11822 - protein, 16 aa, Artificial Sequence
  Synthetically generated peptide
  VARIANT (1)..(16): Xaa = Any Amino Acid
CCEFXACXNPACXTGA

SEQ ID NO: 11823 - protein, 17 aa, Artificial Sequence
  Synthetically generated peptide
  VARIANT (1)..(17): Xaa = Any Amino Acid
CCEFXACXNPACXXTGA

SEQ ID NO: 11824 - protein, 17 aa, Artificial Sequence
  Synthetically generated peptide
  VARIANT (1)..(17): Xaa = Any Amino Acid
CCEFXACXNPACXTXGA

SEQ ID NO: 11825 - protein, 17 aa, Artificial Sequence
  Synthetically generated peptide
  VARIANT (1)..(17): Xaa = Any Amino Acid
CCEFXACXNPACXTGXA

SEQ ID NO: 11826 - protein, 16 aa, Artificial Sequence
  Synthetically generated peptide
  VARIANT (1)..(16): Xaa = Any Amino Acid
CCEFXACXNPACTXGA

SEQ ID NO: 11827 - protein, 17 aa, Artificial Sequence
  Synthetically generated peptide
  VARIANT (1)..(17): Xaa = Any Amino Acid
CCEFXACXNPACTXXGA

SEQ ID NO: 11828 - protein, 17 aa, Artificial Sequence
  Synthetically generated peptide
  VARIANT (1)..(17): Xaa = Any Amino Acid
CCEFXACXNPACTXGXA

SEQ ID NO: 11829 - protein, 16 aa, Artificial Sequence
  Synthetically generated peptide
  VARIANT (1)..(16): Xaa = Any Amino Acid
CCEFXACXNPACTGXA

SEQ ID NO: 11830 - protein, 17 aa, Artificial Sequence
  Synthetically generated peptide
  VARIANT (1)..(17): Xaa = Any Amino Acid
CCEFXACXNPACTGXXA

SEQ ID NO: 11831 - protein, 15 aa, Artificial Sequence
  Synthetically generated peptide
  VARIANT (1)..(15): Xaa = Any Amino Acid
CCEFXACNXPACTGA

SEQ ID NO: 11832 - protein, 16 aa, Artificial Sequence
  Synthetically generated peptide
  VARIANT (1)..(16): Xaa = Any Amino Acid
CCEFXACNXXPACTGA

SEQ ID NO: 11833 - protein, 17 aa, Artificial Sequence
  Synthetically generated peptide
  VARIANT (1)..(17): Xaa = Any Amino Acid
CCEFXACNXXXPACTGA

SEQ ID NO: 11834 - protein, 17 aa, Artificial Sequence
  Synthetically generated peptide
  VARIANT (1)..(17): Xaa = Any Amino Acid
CCEFXACNXXPXACTGA

SEQ ID NO: 11835 - protein, 17 aa, Artificial Sequence
  Synthetically generated peptide
  VARIANT (1)..(17): Xaa = Any Amino Acid
CCEFXACNXXPAXCTGA

SEQ ID NO: 11836 - protein, 17 aa, Artificial Sequence
  Synthetically generated peptide
  VARIANT (1)..(17): Xaa = Any Amino Acid
CCEFXACNXXPACXTGA

SEQ ID NO: 11837 - protein, 17 aa, Artificial Sequence
  Synthetically generated peptide
  VARIANT (1)..(17): Xaa = Any Amino Acid
CCEFXACNXXPACTXGA

SEQ ID NO: 11838 - protein, 17 aa, Artificial Sequence
  Synthetically generated peptide
  VARIANT (1)..(17): Xaa = Any Amino Acid
CCEFXACNXXPACTGXA

SEQ ID NO: 11839 - protein, 16 aa, Artificial Sequence
  Synthetically generated peptide
  VARIANT (1)..(16): Xaa = Any Amino Acid
CCEFXACNXPXACTGA

SEQ ID NO: 11840 - protein, 17 aa, Artificial Sequence
  Synthetically generated peptide
  VARIANT (1)..(17): Xaa = Any Amino Acid
CCEFXACNXPXXACTGA

SEQ ID NO: 11841 - protein, 17 aa, Artificial Sequence
  Synthetically generated peptide
  VARIANT (1)..(17): Xaa = Any Amino Acid
CCEFXACNXPXAXCTGA

SEQ ID NO: 11842 - protein, 17 aa, Artificial Sequence
  Synthetically generated peptide
  VARIANT (1)..(17): Xaa = Any Amino Acid
CCEFXACNXPXACXTGA

SEQ ID NO: 11843 - protein, 17 aa, Artificial Sequence
  Synthetically generated peptide
  VARIANT (1)..(17): Xaa = Any Amino Acid
CCEFXACNXPXACTXGA

SEQ ID NO: 11844 - protein, 17 aa, Artificial Sequence
  Synthetically generated peptide
  VARIANT (1)..(17): Xaa = Any Amino Acid
CCEFXACNXPXACTGXA

SEQ ID NO: 11845 - protein, 16 aa, Artificial Sequence
  Synthetically generated peptide
  VARIANT (1)..(16): Xaa = Any Amino Acid
CCEFXACNXPAXCTGA

SEQ ID NO: 11846 - protein, 17 aa, Artificial Sequence
  Synthetically generated peptide
  VARIANT (1)..(17): Xaa = Any Amino Acid
CCEFXACNXPAXXCTGA

SEQ ID NO: 11847 - protein, 17 aa, Artificial Sequence
  Synthetically generated peptide
  VARIANT (1)..(17): Xaa = Any Amino Acid
CCEFXACNXPAXCXTGA

SEQ ID NO: 11848 - protein, 17 aa, Artificial Sequence
  Synthetically generated peptide
  VARIANT (1)..(17): Xaa = Any Amino Acid
CCEFXACNXPAXCTXGA

SEQ ID NO: 11849 - protein, 17 aa, Artificial Sequence
  Synthetically generated peptide
  VARIANT (1)..(17): Xaa = Any Amino Acid
CCEFXACNXPAXCTGXA

SEQ ID NO: 11850 - protein, 16 aa, Artificial Sequence
  Synthetically generated peptide
  VARIANT (1)..(16): Xaa = Any Amino Acid
CCEFXACNXPACXTGA

SEQ ID NO: 11851 - protein, 17 aa, Artificial Sequence
  Synthetically generated peptide
  VARIANT (1)..(17): Xaa = Any Amino Acid
CCEFXACNXPACXXTGA

SEQ ID NO: 11852 - protein, 17 aa, Artificial Sequence
  Synthetically generated peptide
  VARIANT (1)..(17): Xaa = Any Amino Acid
CCEFXACNXPACXTXGA

SEQ ID NO: 11853 - protein, 17 aa, Artificial Sequence
  Synthetically generated peptide
  VARIANT (1)..(17): Xaa = Any Amino Acid
CCEFXACNXPACXTGXA

SEQ ID NO: 11854 - protein, 16 aa, Artificial Sequence
  Synthetically generated peptide
  VARIANT (1)..(16): Xaa = Any Amino Acid
CCEFXACNXPACTXGA

SEQ ID NO: 11855 - protein, 17 aa, Artificial Sequence
  Synthetically generated peptide
  VARIANT (1)..(17): Xaa = Any Amino Acid
CCEFXACNXPACTXXGA

SEQ ID NO: 11856 - protein, 17 aa, Artificial Sequence
  Synthetically generated peptide
  VARIANT (1)..(17): Xaa = Any Amino Acid
CCEFXACNXPACTXGXA

SEQ ID NO: 11857 - protein, 16 aa, Artificial Sequence
  Synthetically generated peptide
  VARIANT (1)..(16): Xaa = Any Amino Acid
CCEFXACNXPACTGXA

SEQ ID NO: 11858 - protein, 17 aa, Artificial Sequence
  Synthetically generated peptide
  VARIANT (1)..(17): Xaa = Any Amino Acid
CCEFXACNXPACTGXXA

SEQ ID NO: 11859 - protein, 15 aa, Artificial Sequence
  Synthetically generated peptide
  VARIANT (1)..(15): Xaa = Any Amino Acid
CCEFXACNPXACTGA

SEQ ID NO: 11860 - protein, 16 aa, Artificial Sequence
  Synthetically generated peptide
  VARIANT (1)..(16): Xaa = Any Amino Acid
CCEFXACNPXXACTGA

SEQ ID NO: 11861 - protein, 17 aa, Artificial Sequence
  Synthetically generated peptide
  VARIANT (1)..(17): Xaa = Any Amino Acid
CCEFXACNPXXXACTGA

SEQ ID NO: 11862 - protein, 17 aa, Artificial Sequence
  Synthetically generated peptide
  VARIANT (1)..(17): Xaa = Any Amino Acid
CCEFXACNPXXAXCTGA

SEQ ID NO: 11863 - protein, 17 aa, Artificial Sequence
  Synthetically generated peptide
  VARIANT (1)..(17): Xaa = Any Amino Acid
CCEFXACNPXXACXTGA

SEQ ID NO: 11864 - protein, 17 aa, Artificial Sequence
  Synthetically generated peptide
  VARIANT (1)..(17): Xaa = Any Amino Acid
CCEFXACNPXXACTXGA

SEQ ID NO: 11865 - protein, 17 aa, Artificial Sequence
  Synthetically generated peptide
  VARIANT (1)..(17): Xaa = Any Amino Acid
CCEFXACNPXXACTGXA

SEQ ID NO: 11866 - protein, 16 aa, Artificial Sequence
  Synthetically generated peptide
  VARIANT (1)..(16): Xaa = Any Amino Acid
CCEFXACNPXAXCTGA

SEQ ID NO: 11867 - protein, 17 aa, Artificial Sequence
  Synthetically generated peptide
  VARIANT (1)..(17): Xaa = Any Amino Acid
CCEFXACNPXAXXCTGA

SEQ ID NO: 11868 - protein, 17 aa, Artificial Sequence
  Synthetically generated peptide
  VARIANT (1)..(17): Xaa = Any Amino Acid
CCEFXACNPXAXCXTGA

SEQ ID NO: 11869 - protein, 17 aa, Artificial Sequence
  Synthetically generated peptide
  VARIANT (1)..(17): Xaa = Any Amino Acid
CCEFXACNPXAXCTXGA

SEQ ID NO: 11870 - protein, 17 aa, Artificial Sequence
  Synthetically generated peptide
  VARIANT (1)..(17): Xaa = Any Amino Acid
CCEFXACNPXAXCTGXA

SEQ ID NO: 11871 - protein, 16 aa, Artificial Sequence
  Synthetically generated peptide
  VARIANT (1)..(16): Xaa = Any Amino Acid
CCEFXACNPXACXTGA

SEQ ID NO: 11872 - protein, 17 aa, Artificial Sequence
  Synthetically generated peptide
  VARIANT (1)..(17): Xaa = Any Amino Acid
CCEFXACNPXACXXTGA

SEQ ID NO: 11873 - protein, 17 aa, Artificial Sequence
  Synthetically generated peptide
  VARIANT (1)..(17): Xaa = Any Amino Acid
CCEFXACNPXACXTXGA

SEQ ID NO: 11874 - protein, 17 aa, Artificial Sequence
  Synthetically generated peptide
  VARIANT (1)..(17): Xaa = Any Amino Acid
CCEFXACNPXACXTGXA

SEQ ID NO: 11875 - protein, 16 aa, Artificial Sequence
  Synthetically generated peptide
  VARIANT (1)..(16): Xaa = Any Amino Acid
CCEFXACNPXACTXGA

SEQ ID NO: 11876 - protein, 17 aa, Artificial Sequence
  Synthetically generated peptide
  VARIANT (1)..(17): Xaa = Any Amino Acid
CCEFXACNPXACTXXGA

SEQ ID NO: 11877 - protein, 17 aa, Artificial Sequence
  Synthetically generated peptide
  VARIANT (1)..(17): Xaa = Any Amino Acid
CCEFXACNPXACTXGXA

SEQ ID NO: 11878 - protein, 16 aa, Artificial Sequence
  Synthetically generated peptide
  VARIANT (1)..(16): Xaa = Any Amino Acid
CCEFXACNPXACTGXA

SEQ ID NO: 11879 - protein, 17 aa, Artificial Sequence
  Synthetically generated peptide
  VARIANT (1)..(17): Xaa = Any Amino Acid
CCEFXACNPXACTGXXA

SEQ ID NO: 11880 - protein, 15 aa, Artificial Sequence
  Synthetically generated peptide
  VARIANT (1)..(15): Xaa = Any Amino Acid
CCEFXACNPAXCTGA

SEQ ID NO: 11881 - protein, 16 aa, Artificial Sequence
  Synthetically generated peptide
  VARIANT (1)..(16): Xaa = Any Amino Acid
CCEFXACNPAXXCTGA

SEQ ID NO: 11882 - protein, 17 aa, Artificial Sequence
  Synthetically generated peptide
  VARIANT (1)..(17): Xaa = Any Amino Acid
CCEFXACNPAXXXCTGA

SEQ ID NO: 11883 - protein, 17 aa, Artificial Sequence
  Synthetically generated peptide
  VARIANT (1)..(17): Xaa = Any Amino Acid
CCEFXACNPAXXCXTGA

SEQ ID NO: 11884 - protein, 17 aa, Artificial Sequence
  Synthetically generated peptide
  VARIANT (1)..(17): Xaa = Any Amino Acid
CCEFXACNPAXXCTXGA

SEQ ID NO: 11885 - protein, 17 aa, Artificial Sequence
  Synthetically generated peptide
  VARIANT (1)..(17): Xaa = Any Amino Acid
CCEFXACNPAXXCTGXA

SEQ ID NO: 11886 - protein, 16 aa, Artificial Sequence
  Synthetically generated peptide
  VARIANT (1)..(16): Xaa = Any Amino Acid
CCEFXACNPAXCXTGA

SEQ ID NO: 11887 - protein, 17 aa, Artificial Sequence
  Synthetically generated peptide
  VARIANT (1)..(17): Xaa = Any Amino Acid
CCEFXACNPAXCXXTGA

SEQ ID NO: 11888 - protein, 17 aa, Artificial Sequence
  Synthetically generated peptide
  VARIANT (1)..(17): Xaa = Any Amino Acid
CCEFXACNPAXCXTXGA

SEQ ID NO: 11889 - protein, 17 aa, Artificial Sequence
  Synthetically generated peptide
  VARIANT (1)..(17): Xaa = Any Amino Acid
CCEFXACNPAXCXTGXA

SEQ ID NO: 11890 - protein, 16 aa, Artificial Sequence
  Synthetically generated peptide
  VARIANT (1)..(16): Xaa = Any Amino Acid
CCEFXACNPAXCTXGA

SEQ ID NO: 11891 - protein, 17 aa, Artificial Sequence
  Synthetically generated peptide
  VARIANT (1)..(17): Xaa = Any Amino Acid
CCEFXACNPAXCTXXGA

SEQ ID NO: 11892 - protein, 17 aa, Artificial Sequence
  Synthetically generated peptide
  VARIANT (1)..(17): Xaa = Any Amino Acid
CCEFXACNPAXCTXGXA

SEQ ID NO: 11893 - protein, 16 aa, Artificial Sequence
  Synthetically generated peptide
  VARIANT (1)..(16): Xaa = Any Amino Acid
CCEFXACNPAXCTGXA

SEQ ID NO: 11894 - protein, 17 aa, Artificial Sequence
  Synthetically generated peptide
  VARIANT (1)..(17): Xaa = Any Amino Acid
CCEFXACNPAXCTGXXA

SEQ ID NO: 11895 - protein, 15 aa, Artificial Sequence
  Synthetically generated peptide
  VARIANT (1)..(15): Xaa = Any Amino Acid
CCEFXACNPACXTGA

SEQ ID NO: 11896 - protein, 16 aa, Artificial Sequence
  Synthetically generated peptide
  VARIANT (1)..(16): Xaa = Any Amino Acid
CCEFXACNPACXXTGA

SEQ ID NO: 11897 - protein, 17 aa, Artificial Sequence
  Synthetically generated peptide
  VARIANT (1)..(17): Xaa = Any Amino Acid
CCEFXACNPACXXXTGA

SEQ ID NO: 11898 - protein, 17 aa, Artificial Sequence
  Synthetically generated peptide
  VARIANT (1)..(17): Xaa = Any Amino Acid
CCEFXACNPACXXTXGA

SEQ ID NO: 11899 - protein, 17 aa, Artificial Sequence
  Synthetically generated peptide
  VARIANT (1)..(17): Xaa = Any Amino Acid
CCEFXACNPACXXTGXA

SEQ ID NO: 11900 - protein, 16 aa, Artificial Sequence
  Synthetically generated peptide
  VARIANT (1)..(16): Xaa = Any Amino Acid
CCEFXACNPACXTXGA

SEQ ID NO: 11901 - protein, 17 aa, Artificial Sequence
  Synthetically generated peptide
  VARIANT (1)..(17): Xaa = Any Amino Acid
CCEFXACNPACXTXXGA

SEQ ID NO: 11902 - protein, 17 aa, Artificial Sequence
  Synthetically generated peptide
  VARIANT (1)..(17): Xaa = Any Amino Acid
CCEFXACNPACXTXGXA

SEQ ID NO: 11903 - protein, 16 aa, Artificial Sequence
  Synthetically generated peptide
  VARIANT (1)..(16): Xaa = Any Amino Acid
CCEFXACNPACXTGXA

SEQ ID NO: 11904 - protein, 17 aa, Artificial Sequence
  Synthetically generated peptide
  VARIANT (1)..(17): Xaa = Any Amino Acid
CCEFXACNPACXTGXXA

SEQ ID NO: 11905 - protein, 15 aa, Artificial Sequence
  Synthetically generated peptide
  VARIANT (1)..(15): Xaa = Any Amino Acid
CCEFXACNPACTXGA

SEQ ID NO: 11906 - protein, 16 aa, Artificial Sequence
  Synthetically generated peptide
  VARIANT (1)..(16): Xaa = Any Amino Acid
CCEFXACNPACTXXGA

SEQ ID NO: 11907 - protein, 17 aa, Artificial Sequence
  Synthetically generated peptide
  VARIANT (1)..(17): Xaa = Any Amino Acid
CCEFXACNPACTXXXGA

SEQ ID NO: 11908 - protein, 17 aa, Artificial Sequence
  Synthetically generated peptide
  VARIANT (1)..(17): Xaa = Any Amino Acid
CCEFXACNPACTXXGXA

SEQ ID NO: 11909 - protein, 16 aa, Artificial Sequence
  Synthetically generated peptide
  VARIANT (1)..(16): Xaa = Any Amino Acid
CCEFXACNPACTXGXA

SEQ ID NO: 11910 - protein, 17 aa, Artificial Sequence
  Synthetically generated peptide
  VARIANT (1)..(17): Xaa = Any Amino Acid
CCEFXACNPACTXGXXA

SEQ ID NO: 11911 - protein, 15 aa, Artificial Sequence
  Synthetically generated peptide
  VARIANT (1)..(15): Xaa = Any Amino Acid
CCEFXACNPACTGXA

SEQ ID NO: 11912 - protein, 16 aa, Artificial Sequence
  Synthetically generated peptide
  VARIANT (1)..(16): Xaa = Any Amino Acid
CCEFXACNPACTGXXA

SEQ ID NO: 11913 - protein, 17 aa, Artificial Sequence
  Synthetically generated peptide
  VARIANT (1)..(17): Xaa = Any Amino Acid
CCEFXACNPACTGXXXA

SEQ ID NO: 11914 - protein, 14 aa, Artificial Sequence
  Synthetically generated peptide
  VARIANT (1)..(14): Xaa = Any Amino Acid
CCEFACXNPACTGA

SEQ ID NO: 11915 - protein, 15 aa, Artificial Sequence
  Synthetically generated peptide
  VARIANT (1)..(15): Xaa = Any Amino Acid
CCEFACXXNPACTGA

SEQ ID NO: 11916 - protein, 16 aa, Artificial Sequence
  Synthetically generated peptide
  VARIANT (1)..(16): Xaa = Any Amino Acid
CCEFACXXXNPACTGA

SEQ ID NO: 11917 - protein, 17 aa, Artificial Sequence
  Synthetically generated peptide
  VARIANT (1)..(17): Xaa = Any Amino Acid
CCEFACXXXXNPACTGA

SEQ ID NO: 11918 - protein, 17 aa, Artificial Sequence
  Synthetically generated peptide
  VARIANT (1)..(17): Xaa = Any Amino Acid
CCEFACXXXNXPACTGA

SEQ ID NO: 11919 - protein, 17 aa, Artificial Sequence
  Synthetically generated peptide
  VARIANT (1)..(17): Xaa = Any Amino Acid
CCEFACXXXNPXACTGA

SEQ ID NO: 11920 - protein, 17 aa, Artificial Sequence
  Synthetically generated peptide
  VARIANT (1)..(17): Xaa = Any Amino Acid
CCEFACXXXNPAXCTGA

SEQ ID NO: 11921 - protein, 17 aa, Artificial Sequence
  Synthetically generated peptide
  VARIANT (1)..(17): Xaa = Any Amino Acid
CCEFACXXXNPACXTGA

SEQ ID NO: 11922 - protein, 17 aa, Artificial Sequence
  Synthetically generated peptide
  VARIANT (1)..(17): Xaa = Any Amino Acid
CCEFACXXXNPACTXGA

SEQ ID NO: 11923 - protein, 17 aa, Artificial Sequence
  Synthetically generated peptide
  VARIANT (1)..(17): Xaa = Any Amino Acid
CCEFACXXXNPACTGXA

SEQ ID NO: 11924 - protein, 16 aa, Artificial Sequence
  Synthetically generated peptide
  VARIANT (1)..(16): Xaa = Any Amino Acid
CCEFACXXNXPACTGA

SEQ ID NO: 11925 - protein, 17 aa, Artificial Sequence
  Synthetically generated peptide
  VARIANT (1)..(17): Xaa = Any Amino Acid
CCEFACXXNXXPACTGA

SEQ ID NO: 11926 - protein, 17 aa, Artificial Sequence
  Synthetically generated peptide
  VARIANT (1)..(17): Xaa = Any Amino Acid
CCEFACXXNXPXACTGA

SEQ ID NO: 11927 - protein, 17 aa, Artificial Sequence
  Synthetically generated peptide
  VARIANT (1)..(17): Xaa = Any Amino Acid
CCEFACXXNXPAXCTGA

SEQ ID NO: 11928 - protein, 17 aa, Artificial Sequence
  Synthetically generated peptide
  VARIANT (1)..(17): Xaa = Any Amino Acid
CCEFACXXNXPACXTGA

SEQ ID NO: 11929 - protein, 17 aa, Artificial Sequence
  Synthetically generated peptide
  VARIANT (1)..(17): Xaa = Any Amino Acid
CCEFACXXNXPACTXGA

SEQ ID NO: 11930 - protein, 17 aa, Artificial Sequence
  Synthetically generated peptide
  VARIANT (1)..(17): Xaa = Any Amino Acid
CCEFACXXNXPACTGXA

SEQ ID NO: 11931 - protein, 16 aa, Artificial Sequence
  Synthetically generated peptide
  VARIANT (1)..(16): Xaa = Any Amino Acid
CCEFACXXNPXACTGA

SEQ ID NO: 11932 - protein, 17 aa, Artificial Sequence
  Synthetically generated peptide
  VARIANT (1)..(17): Xaa = Any Amino Acid
CCEFACXXNPXXACTGA

SEQ ID NO: 11933 - protein, 17 aa, Artificial Sequence
  Synthetically generated peptide
  VARIANT (1)..(17): Xaa = Any Amino Acid
CCEFACXXNPXAXCTGA

SEQ ID NO: 11934 - protein, 17 aa, Artificial Sequence
  Synthetically generated peptide
  VARIANT (1)..(17): Xaa = Any Amino Acid
CCEFACXXNPXACXTGA

SEQ ID NO: 11935 - protein, 17 aa, Artificial Sequence
  Synthetically generated peptide
  VARIANT (1)..(17): Xaa = Any Amino Acid
CCEFACXXNPXACTXGA

SEQ ID NO: 11936 - protein, 17 aa, Artificial Sequence
  Synthetically generated peptide
  VARIANT (1)..(17): Xaa = Any Amino Acid
CCEFACXXNPXACTGXA

SEQ ID NO: 11937 - protein, 16 aa, Artificial Sequence
  Synthetically generated peptide
  VARIANT (1)..(16): Xaa = Any Amino Acid
CCEFACXXNPAXCTGA

SEQ ID NO: 11938 - protein, 17 aa, Artificial Sequence
  Synthetically generated peptide
  VARIANT (1)..(17): Xaa = Any Amino Acid
CCEFACXXNPAXXCTGA

SEQ ID NO: 11939 - protein, 17 aa, Artificial Sequence
  Synthetically generated peptide
  VARIANT (1)..(17): Xaa = Any Amino Acid
CCEFACXXNPAXCXTGA

SEQ ID NO: 11940 - protein, 17 aa, Artificial Sequence
  Synthetically generated peptide
  VARIANT (1)..(17): Xaa = Any Amino Acid
CCEFACXXNPAXCTXGA

SEQ ID NO: 11941 - protein, 17 aa, Artificial Sequence
  Synthetically generated peptide
  VARIANT (1)..(17): Xaa = Any Amino Acid
CCEFACXXNPAXCTGXA

SEQ ID NO: 11942 - protein, 16 aa, Artificial Sequence
  Synthetically generated peptide
  VARIANT (1)..(16): Xaa = Any Amino Acid
CCEFACXXNPACXTGA

SEQ ID NO: 11943 - protein, 17 aa, Artificial Sequence
  Synthetically generated peptide
  VARIANT (1)..(17): Xaa = Any Amino Acid
CCEFACXXNPACXXTGA

SEQ ID NO: 11944 - protein, 17 aa, Artificial Sequence
  Synthetically generated peptide
  VARIANT (1)..(17): Xaa = Any Amino Acid
CCEFACXXNPACXTXGA

SEQ ID NO: 11945 - protein, 17 aa, Artificial Sequence
  Synthetically generated peptide
  VARIANT (1)..(17): Xaa = Any Amino Acid
CCEFACXXNPACXTGXA

SEQ ID NO: 11946 - protein, 16 aa, Artificial Sequence
  Synthetically generated peptide
  VARIANT (1)..(16): Xaa = Any Amino Acid
CCEFACXXNPACTXGA

SEQ ID NO: 11947 - protein, 17 aa, Artificial Sequence
  Synthetically generated peptide
  VARIANT (1)..(17): Xaa = Any Amino Acid
CCEFACXXNPACTXXGA

SEQ ID NO: 11948 - protein, 17 aa, Artificial Sequence
  Synthetically generated peptide
  VARIANT (1)..(17): Xaa = Any Amino Acid
CCEFACXXNPACTXGXA

SEQ ID NO: 11949 - protein, 16 aa, Artificial Sequence
  Synthetically generated peptide
  VARIANT (1)..(16): Xaa = Any Amino Acid
CCEFACXXNPACTGXA

SEQ ID NO: 11950 - protein, 17 aa, Artificial Sequence
  Synthetically generated peptide
  VARIANT (1)..(17): Xaa = Any Amino Acid
CCEFACXXNPACTGXXA

SEQ ID NO: 11951 - protein, 15 aa, Artificial Sequence
  Synthetically generated peptide
  VARIANT (1)..(15): Xaa = Any Amino Acid
CCEFACXNXPACTGA

SEQ ID NO: 11952 - protein, 16 aa, Artificial Sequence
  Synthetically generated peptide
  VARIANT (1)..(16): Xaa = Any Amino Acid
CCEFACXNXXPACTGA

SEQ ID NO: 11953 - protein, 17 aa, Artificial Sequence
  Synthetically generated peptide
  VARIANT (1)..(17): Xaa = Any Amino Acid
CCEFACXNXXXPACTGA

SEQ ID NO: 11954 - protein, 17 aa, Artificial Sequence
  Synthetically generated peptide
  VARIANT (1)..(17): Xaa = Any Amino Acid
CCEFACXNXXPXACTGA

SEQ ID NO: 11955 - protein, 17 aa, Artificial Sequence
  Synthetically generated peptide
  VARIANT (1)..(17): Xaa = Any Amino Acid
CCEFACXNXXPAXCTGA

SEQ ID NO: 11956 - protein, 17 aa, Artificial Sequence
  Synthetically generated peptide
  VARIANT (1)..(17): Xaa = Any Amino Acid
CCEFACXNXXPACXTGA

SEQ ID NO: 11957 - protein, 17 aa, Artificial Sequence
  Synthetically generated peptide
  VARIANT (1)..(17): Xaa = Any Amino Acid
CCEFACXNXXPACTXGA

SEQ ID NO: 11958 - protein, 17 aa, Artificial Sequence
  Synthetically generated peptide
  VARIANT (1)..(17): Xaa = Any Amino Acid
CCEFACXNXXPACTGXA

SEQ ID NO: 11959 - protein, 16 aa, Artificial Sequence
  Synthetically generated peptide
  VARIANT (1)..(16): Xaa = Any Amino Acid
CCEFACXNXPXACTGA

SEQ ID NO: 11960 - protein, 17 aa, Artificial Sequence
  Synthetically generated peptide
  VARIANT (1)..(17): Xaa = Any Amino Acid
CCEFACXNXPXXACTGA

SEQ ID NO: 11961 - protein, 17 aa, Artificial Sequence
  Synthetically generated peptide
  VARIANT (1)..(17): Xaa = Any Amino Acid
CCEFACXNXPXAXCTGA

SEQ ID NO: 11962 - protein, 17 aa, Artificial Sequence
  Synthetically generated peptide
  VARIANT (1)..(17): Xaa = Any Amino Acid
CCEFACXNXPXACXTGA

SEQ ID NO: 11963 - protein, 17 aa, Artificial Sequence
  Synthetically generated peptide
  VARIANT (1)..(17): Xaa = Any Amino Acid
CCEFACXNXPXACTXGA

SEQ ID NO: 11964 - protein, 17 aa, Artificial Sequence
  Synthetically generated peptide
  VARIANT (1)..(17): Xaa = Any Amino Acid
CCEFACXNXPXACTGXA

SEQ ID NO: 11965 - protein, 16 aa, Artificial Sequence
  Synthetically generated peptide
  VARIANT (1)..(16): Xaa = Any Amino Acid
CCEFACXNXPAXCTGA

SEQ ID NO: 11966 - protein, 17 aa, Artificial Sequence
  Synthetically generated peptide
  VARIANT (1)..(17): Xaa = Any Amino Acid
CCEFACXNXPAXXCTGA

SEQ ID NO: 11967 - protein, 17 aa, Artificial Sequence
  Synthetically generated peptide
  VARIANT (1)..(17): Xaa = Any Amino Acid
CCEFACXNXPAXCXTGA

SEQ ID NO: 11968 - protein, 17 aa, Artificial Sequence
  Synthetically generated peptide
  VARIANT (1)..(17): Xaa = Any Amino Acid
CCEFACXNXPAXCTXGA

SEQ ID NO: 11969 - protein, 17 aa, Artificial Sequence
  Synthetically generated peptide
  VARIANT (1)..(17): Xaa = Any Amino Acid
CCEFACXNXPAXCTGXA

SEQ ID NO: 11970 - protein, 16 aa, Artificial Sequence
  Synthetically generated peptide
  VARIANT (1)..(16): Xaa = Any Amino Acid
CCEFACXNXPACXTGA

SEQ ID NO: 11971 - protein, 17 aa, Artificial Sequence
  Synthetically generated peptide
  VARIANT (1)..(17): Xaa = Any Amino Acid
CCEFACXNXPACXXTGA

SEQ ID NO: 11972 - protein, 17 aa, Artificial Sequence
  Synthetically generated peptide
  VARIANT (1)..(17): Xaa = Any Amino Acid
CCEFACXNXPACXTXGA

SEQ ID NO: 11973 - protein, 17 aa, Artificial Sequence
  Synthetically generated peptide
  VARIANT (1)..(17): Xaa = Any Amino Acid
CCEFACXNXPACXTGXA

SEQ ID NO: 11974 - protein, 16 aa, Artificial Sequence
  Synthetically generated peptide
  VARIANT (1)..(16): Xaa = Any Amino Acid
CCEFACXNXPACTXGA

SEQ ID NO: 11975 - protein, 17 aa, Artificial Sequence
  Synthetically generated peptide
  VARIANT (1)..(17): Xaa = Any Amino Acid
CCEFACXNXPACTXXGA

SEQ ID NO: 11976 - protein, 17 aa, Artificial Sequence
  Synthetically generated peptide
  VARIANT (1)..(17): Xaa = Any Amino Acid
CCEFACXNXPACTXGXA

SEQ ID NO: 11977 - protein, 16 aa, Artificial Sequence
  Synthetically generated peptide
  VARIANT (1)..(16): Xaa = Any Amino Acid
CCEFACXNXPACTGXA

SEQ ID NO: 11978 - protein, 17 aa, Artificial Sequence
  Synthetically generated peptide
  VARIANT (1)..(17): Xaa = Any Amino Acid
CCEFACXNXPACTGXXA

SEQ ID NO: 11979 - protein, 15 aa, Artificial Sequence
  Synthetically generated peptide
  VARIANT (1)..(15): Xaa = Any Amino Acid
CCEFACXNPXACTGA

SEQ ID NO: 11980 - protein, 16 aa, Artificial Sequence
  Synthetically generated peptide
  VARIANT (1)..(16): Xaa = Any Amino Acid
CCEFACXNPXXACTGA

SEQ ID NO: 11981 - protein, 17 aa, Artificial Sequence
  Synthetically generated peptide
  VARIANT (1)..(17): Xaa = Any Amino Acid
CCEFACXNPXXXACTGA

SEQ ID NO: 11982 - protein, 17 aa, Artificial Sequence
  Synthetically generated peptide
  VARIANT (1)..(17): Xaa = Any Amino Acid
CCEFACXNPXXAXCTGA

SEQ ID NO: 11983 - protein, 17 aa, Artificial Sequence
  Synthetically generated peptide
  VARIANT (1)..(17): Xaa = Any Amino Acid
CCEFACXNPXXACXTGA

SEQ ID NO: 11984 - protein, 17 aa, Artificial Sequence
  Synthetically generated peptide
  VARIANT (1)..(17): Xaa = Any Amino Acid
CCEFACXNPXXACTXGA

SEQ ID NO: 11985 - protein, 17 aa, Artificial Sequence
  Synthetically generated peptide
  VARIANT (1)..(17): Xaa = Any Amino Acid
CCEFACXNPXXACTGXA

SEQ ID NO: 11986 - protein, 16 aa, Artificial Sequence
  Synthetically generated peptide
  VARIANT (1)..(16): Xaa = Any Amino Acid
CCEFACXNPXAXCTGA

SEQ ID NO: 11987 - protein, 17 aa, Artificial Sequence
  Synthetically generated peptide
  VARIANT (1)..(17): Xaa = Any Amino Acid
CCEFACXNPXAXXCTGA

SEQ ID NO: 11988 - protein, 17 aa, Artificial Sequence
  Synthetically generated peptide
  VARIANT (1)..(17): Xaa = Any Amino Acid
CCEFACXNPXAXCXTGA

SEQ ID NO: 11989 - protein, 17 aa, Artificial Sequence
  Synthetically generated peptide
  VARIANT (1)..(17): Xaa = Any Amino Acid
CCEFACXNPXAXCTXGA

SEQ ID NO: 11990 - protein, 17 aa, Artificial Sequence
  Synthetically generated peptide
  VARIANT (1)..(17): Xaa = Any Amino Acid
CCEFACXNPXAXCTGXA

SEQ ID NO: 11991 - protein, 16 aa, Artificial Sequence
  Synthetically generated peptide
  VARIANT (1)..(16): Xaa = Any Amino Acid
CCEFACXNPXACXTGA

SEQ ID NO: 11992 - protein, 17 aa, Artificial Sequence
  Synthetically generated peptide
  VARIANT (1)..(17): Xaa = Any Amino Acid
CCEFACXNPXACXXTGA

SEQ ID NO: 11993 - protein, 17 aa, Artificial Sequence
  Synthetically generated peptide
  VARIANT (1)..(17): Xaa = Any Amino Acid
CCEFACXNPXACXTXGA

SEQ ID NO: 11994 - protein, 17 aa, Artificial Sequence
  Synthetically generated peptide
  VARIANT (1)..(17): Xaa = Any Amino Acid
CCEFACXNPXACXTGXA

SEQ ID NO: 11995 - protein, 16 aa, Artificial Sequence
  Synthetically generated peptide
  VARIANT (1)..(16): Xaa = Any Amino Acid
CCEFACXNPXACTXGA

SEQ ID NO: 11996 - protein, 17 aa, Artificial Sequence
  Synthetically generated peptide
  VARIANT (1)..(17): Xaa = Any Amino Acid
CCEFACXNPXACTXXGA

SEQ ID NO: 11997 - protein, 17 aa, Artificial Sequence
  Synthetically generated peptide
  VARIANT (1)..(17): Xaa = Any Amino Acid
CCEFACXNPXACTXGXA

SEQ ID NO: 11998 - protein, 16 aa, Artificial Sequence
  Synthetically generated peptide
  VARIANT (1)..(16): Xaa = Any Amino Acid
CCEFACXNPXACTGXA

SEQ ID NO: 11999 - protein, 17 aa, Artificial Sequence
  Synthetically generated peptide
  VARIANT (1)..(17): Xaa = Any Amino Acid
CCEFACXNPXACTGXXA

SEQ ID NO: 12000 - protein, 15 aa, Artificial Sequence
  Synthetically generated peptide
  VARIANT (1)..(15): Xaa = Any Amino Acid
CCEFACXNPAXCTGA

SEQ ID NO: 12001 - protein, 16 aa, Artificial Sequence
  Synthetically generated peptide
  VARIANT (1)..(16): Xaa = Any Amino Acid
CCEFACXNPAXXCTGA

SEQ ID NO: 12002 - protein, 17 aa, Artificial Sequence
  Synthetically generated peptide
  VARIANT (1)..(17): Xaa = Any Amino Acid
CCEFACXNPAXXXCTGA

SEQ ID NO: 12003 - protein, 17 aa, Artificial Sequence
  Synthetically generated peptide
  VARIANT (1)..(17): Xaa = Any Amino Acid
CCEFACXNPAXXCXTGA

SEQ ID NO: 12004 - protein, 17 aa, Artificial Sequence
  Synthetically generated peptide
  VARIANT (1)..(17): Xaa = Any Amino Acid
CCEFACXNPAXXCTXGA

SEQ ID NO: 12005 - protein, 17 aa, Artificial Sequence
  Synthetically generated peptide
  VARIANT (1)..(17): Xaa = Any Amino Acid
CCEFACXNPAXXCTGXA

SEQ ID NO: 12006 - protein, 16 aa, Artificial Sequence
  Synthetically generated peptide
  VARIANT (1)..(16): Xaa = Any Amino Acid
CCEFACXNPAXCXTGA

SEQ ID NO: 12007 - protein, 17 aa, Artificial Sequence
  Synthetically generated peptide
  VARIANT (1)..(17): Xaa = Any Amino Acid
CCEFACXNPAXCXXTGA

SEQ ID NO: 12008 - protein, 17 aa, Artificial Sequence
  Synthetically generated peptide
  VARIANT (1)..(17): Xaa = Any Amino Acid
CCEFACXNPAXCXTXGA

SEQ ID NO: 12009 - protein, 17 aa, Artificial Sequence
  Synthetically generated peptide
  VARIANT (1)..(17): Xaa = Any Amino Acid
CCEFACXNPAXCXTGXA

SEQ ID NO: 12010 - protein, 16 aa, Artificial Sequence
  Synthetically generated peptide
  VARIANT (1)..(16): Xaa = Any Amino Acid
CCEFACXNPAXCTXGA

SEQ ID NO: 12011 - protein, 17 aa, Artificial Sequence
  Synthetically generated peptide
  VARIANT (1)..(17): Xaa = Any Amino Acid
CCEFACXNPAXCTXXGA

SEQ ID NO: 12012 - protein, 17 aa, Artificial Sequence
  Synthetically generated peptide
  VARIANT (1)..(17): Xaa = Any Amino Acid
CCEFACXNPAXCTXGXA

SEQ ID NO: 12013 - protein, 16 aa, Artificial Sequence
  Synthetically generated peptide
  VARIANT (1)..(16): Xaa = Any Amino Acid
CCEFACXNPAXCTGXA

SEQ ID NO: 12014 - protein, 17 aa, Artificial Sequence
  Synthetically generated peptide
  VARIANT (1)..(17): Xaa = Any Amino Acid
CCEFACXNPAXCTGXXA

SEQ ID NO: 12015 - protein, 15 aa, Artificial Sequence
  Synthetically generated peptide
  VARIANT (1)..(15): Xaa = Any Amino Acid
CCEFACXNPACXTGA

SEQ ID NO: 12016 - protein, 16 aa, Artificial Sequence
  Synthetically generated peptide
  VARIANT (1)..(16): Xaa = Any Amino Acid
CCEFACXNPACXXTGA

SEQ ID NO: 12017 - protein, 17 aa, Artificial Sequence
  Synthetically generated peptide
  VARIANT (1)..(17): Xaa = Any Amino Acid
CCEFACXNPACXXXTGA

SEQ ID NO: 12018 - protein, 17 aa, Artificial Sequence
  Synthetically generated peptide
  VARIANT (1)..(17): Xaa = Any Amino Acid
CCEFACXNPACXXTXGA

SEQ ID NO: 12019 - protein, 17 aa, Artificial Sequence
  Synthetically generated peptide
  VARIANT (1)..(17): Xaa = Any Amino Acid
CCEFACXNPACXXTGXA

SEQ ID NO: 12020 - protein, 16 aa, Artificial Sequence
  Synthetically generated peptide
  VARIANT (1)..(16): Xaa = Any Amino Acid
CCEFACXNPACXTXGA

SEQ ID NO: 12021 - protein, 17 aa, Artificial Sequence
  Synthetically generated peptide
  VARIANT (1)..(17): Xaa = Any Amino Acid
CCEFACXNPACXTXXGA

SEQ ID NO: 12022 - protein, 17 aa, Artificial Sequence
  Synthetically generated peptide
  VARIANT (1)..(17): Xaa = Any Amino Acid
CCEFACXNPACXTXGXA

SEQ ID NO: 12023 - protein, 16 aa, Artificial Sequence
  Synthetically generated peptide
  VARIANT (1)..(16): Xaa = Any Amino Acid
CCEFACXNPACXTGXA

SEQ ID NO: 12024 - protein, 17 aa, Artificial Sequence
  Synthetically generated peptide
  VARIANT (1)..(17): Xaa = Any Amino Acid
CCEFACXNPACXTGXXA

SEQ ID NO: 12025 - protein, 15 aa, Artificial Sequence
  Synthetically generated peptide
  VARIANT (1)..(15): Xaa = Any Amino Acid
CCEFACXNPACTXGA

SEQ ID NO: 12026 - protein, 16 aa, Artificial Sequence
  Synthetically generated peptide
  VARIANT (1)..(16): Xaa = Any Amino Acid
CCEFACXNPACTXXGA

SEQ ID NO: 12027 - protein, 17 aa, Artificial Sequence
  Synthetically generated peptide
  VARIANT (1)..(17): Xaa = Any Amino Acid
CCEFACXNPACTXXXGA

SEQ ID NO: 12028 - protein, 17 aa, Artificial Sequence
  Synthetically generated peptide
  VARIANT (1)..(17): Xaa = Any Amino Acid
CCEFACXNPACTXXGXA

SEQ ID NO: 12029 - protein, 16 aa, Artificial Sequence
  Synthetically generated peptide
  VARIANT (1)..(16): Xaa = Any Amino Acid
CCEFACXNPACTXGXA

SEQ ID NO: 12030 - protein, 17 aa, Artificial Sequence
  Synthetically generated peptide
  VARIANT (1)..(17): Xaa = Any Amino Acid
CCEFACXNPACTXGXXA

SEQ ID NO: 12031 - protein, 15 aa, Artificial Sequence
  Synthetically generated peptide
  VARIANT (1)..(15): Xaa = Any Amino Acid
CCEFACXNPACTGXA

SEQ ID NO: 12032 - protein, 16 aa, Artificial Sequence
  Synthetically generated peptide
  VARIANT (1)..(16): Xaa = Any Amino Acid
CCEFACXNPACTGXXA

SEQ ID NO: 12033 - protein, 17 aa, Artificial Sequence
  Synthetically generated peptide
  VARIANT (1)..(17): Xaa = Any Amino Acid
CCEFACXNPACTGXXXA

SEQ ID NO: 12034 - protein, 14 aa, Artificial Sequence
  Synthetically generated peptide
  VARIANT (1)..(14): Xaa = Any Amino Acid
CCEFACNXPACTGA

SEQ ID NO: 12035 - protein, 15 aa, Artificial Sequence
  Synthetically generated peptide
  VARIANT (1)..(15): Xaa = Any Amino Acid
CCEFACNXXPACTGA

SEQ ID NO: 12036 - protein, 16 aa, Artificial Sequence
  Synthetically generated peptide
  VARIANT (1)..(16): Xaa = Any Amino Acid
CCEFACNXXXPACTGA

SEQ ID NO: 12037 - protein, 17 aa, Artificial Sequence
  Synthetically generated peptide
  VARIANT (1)..(17): Xaa = Any Amino Acid
CCEFACNXXXXPACTGA

SEQ ID NO: 12038 - protein, 17 aa, Artificial Sequence
  Synthetically generated peptide
  VARIANT (1)..(17): Xaa = Any Amino Acid
CCEFACNXXXPXACTGA

SEQ ID NO: 12039 - protein, 17 aa, Artificial Sequence
  Synthetically generated peptide
  VARIANT (1)..(17): Xaa = Any Amino Acid
CCEFACNXXXPAXCTGA

SEQ ID NO: 12040 - protein, 17 aa, Artificial Sequence
  Synthetically generated peptide
  VARIANT (1)..(17): Xaa = Any Amino Acid
CCEFACNXXXPACXTGA

SEQ ID NO: 12041 - protein, 17 aa, Artificial Sequence
  Synthetically generated peptide
  VARIANT (1)..(17): Xaa = Any Amino Acid
CCEFACNXXXPACTXGA

SEQ ID NO: 12042 - protein, 17 aa, Artificial Sequence
  Synthetically generated peptide
  VARIANT (1)..(17): Xaa = Any Amino Acid
CCEFACNXXXPACTGXA

SEQ ID NO: 12043 - protein, 16 aa, Artificial Sequence
  Synthetically generated peptide
  VARIANT (1)..(16): Xaa = Any Amino Acid
CCEFACNXXPXACTGA

SEQ ID NO: 12044 - protein, 17 aa, Artificial Sequence
  Synthetically generated peptide
  VARIANT (1)..(17): Xaa = Any Amino Acid
CCEFACNXXPXXACTGA

SEQ ID NO: 12045 - protein, 17 aa, Artificial Sequence
  Synthetically generated peptide
  VARIANT (1)..(17): Xaa = Any Amino Acid
CCEFACNXXPXAXCTGA

SEQ ID NO: 12046 - protein, 17 aa, Artificial Sequence
  Synthetically generated peptide
  VARIANT (1)..(17): Xaa = Any Amino Acid
CCEFACNXXPXACXTGA

SEQ ID NO: 12047 - protein, 17 aa, Artificial Sequence
  Synthetically generated peptide
  VARIANT (1)..(17): Xaa = Any Amino Acid
CCEFACNXXPXACTXGA

SEQ ID NO: 12048 - protein, 17 aa, Artificial Sequence
  Synthetically generated peptide
  VARIANT (1)..(17): Xaa = Any Amino Acid
CCEFACNXXPXACTGXA

SEQ ID NO: 12049 - protein, 16 aa, Artificial Sequence
  Synthetically generated peptide
  VARIANT (1)..(16): Xaa = Any Amino Acid
CCEFACNXXPAXCTGA

SEQ ID NO: 12050 - protein, 17 aa, Artificial Sequence
  Synthetically generated peptide
  VARIANT (1)..(17): Xaa = Any Amino Acid
CCEFACNXXPAXXCTGA

SEQ ID NO: 12051 - protein, 17 aa, Artificial Sequence
  Synthetically generated peptide
  VARIANT (1)..(17): Xaa = Any Amino Acid
CCEFACNXXPAXCXTGA

SEQ ID NO: 12052 - protein, 17 aa, Artificial Sequence
  Synthetically generated peptide
  VARIANT (1)..(17): Xaa = Any Amino Acid
CCEFACNXXPAXCTXGA

SEQ ID NO: 12053 - protein, 17 aa, Artificial Sequence
  Synthetically generated peptide
  VARIANT (1)..(17): Xaa = Any Amino Acid
CCEFACNXXPAXCTGXA

SEQ ID NO: 12054 - protein, 16 aa, Artificial Sequence
  Synthetically generated peptide
  VARIANT (1)..(16): Xaa = Any Amino Acid
CCEFACNXXPACXTGA

SEQ ID NO: 12055 - protein, 17 aa, Artificial Sequence
  Synthetically generated peptide
  VARIANT (1)..(17): Xaa = Any Amino Acid
CCEFACNXXPACXXTGA

SEQ ID NO: 12056 - protein, 17 aa, Artificial Sequence
  Synthetically generated peptide
  VARIANT (1)..(17): Xaa = Any Amino Acid
CCEFACNXXPACXTXGA

SEQ ID NO: 12057 - protein, 17 aa, Artificial Sequence
  Synthetically generated peptide
  VARIANT (1)..(17): Xaa = Any Amino Acid
CCEFACNXXPACXTGXA

SEQ ID NO: 12058 - protein, 16 aa, Artificial Sequence
  Synthetically generated peptide
  VARIANT (1)..(16): Xaa = Any Amino Acid
CCEFACNXXPACTXGA

SEQ ID NO: 12059 - protein, 17 aa, Artificial Sequence
  Synthetically generated peptide
  VARIANT (1)..(17): Xaa = Any Amino Acid
CCEFACNXXPACTXXGA

SEQ ID NO: 12060 - protein, 17 aa, Artificial Sequence
  Synthetically generated peptide
  VARIANT (1)..(17): Xaa = Any Amino Acid
CCEFACNXXPACTXGXA

SEQ ID NO: 12061 - protein, 16 aa, Artificial Sequence
  Synthetically generated peptide
  VARIANT (1)..(16): Xaa = Any Amino Acid
CCEFACNXXPACTGXA

SEQ ID NO: 12062 - protein, 17 aa, Artificial Sequence
  Synthetically generated peptide
  VARIANT (1)..(17): Xaa = Any Amino Acid
CCEFACNXXPACTGXXA

SEQ ID NO: 12063 - protein, 15 aa, Artificial Sequence
  Synthetically generated peptide
  VARIANT (1)..(15): Xaa = Any Amino Acid
CCEFACNXPXACTGA

SEQ ID NO: 12064 - protein, 16 aa, Artificial Sequence
  Synthetically generated peptide
  VARIANT (1)..(16): Xaa = Any Amino Acid
CCEFACNXPXXACTGA

SEQ ID NO: 12065 - protein, 17 aa, Artificial Sequence
  Synthetically generated peptide
  VARIANT (1)..(17): Xaa = Any Amino Acid
CCEFACNXPXXXACTGA

SEQ ID NO: 12066 - protein, 17 aa, Artificial Sequence
  Synthetically generated peptide
  VARIANT (1)..(17): Xaa = Any Amino Acid
CCEFACNXPXXAXCTGA

SEQ ID NO: 12067 - protein, 17 aa, Artificial Sequence
  Synthetically generated peptide
  VARIANT (1)..(17): Xaa = Any Amino Acid
CCEFACNXPXXACXTGA

SEQ ID NO: 12068 - protein, 17 aa, Artificial Sequence
  Synthetically generated peptide
  VARIANT (1)..(17): Xaa = Any Amino Acid
CCEFACNXPXXACTXGA

SEQ ID NO: 12069 - protein, 17 aa, Artificial Sequence
  Synthetically generated peptide
  VARIANT (1)..(17): Xaa = Any Amino Acid
CCEFACNXPXXACTGXA

SEQ ID NO: 12070 - protein, 16 aa, Artificial Sequence
  Synthetically generated peptide
  VARIANT (1)..(16): Xaa = Any Amino Acid
CCEFACNXPXAXCTGA

SEQ ID NO: 12071 - protein, 17 aa, Artificial Sequence
  Synthetically generated peptide
  VARIANT (1)..(17): Xaa = Any Amino Acid
CCEFACNXPXAXXCTGA

SEQ ID NO: 12072 - protein, 17 aa, Artificial Sequence
  Synthetically generated peptide
  VARIANT (1)..(17): Xaa = Any Amino Acid
CCEFACNXPXAXCXTGA

SEQ ID NO: 12073 - protein, 17 aa, Artificial Sequence
  Synthetically generated peptide
  VARIANT (1)..(17): Xaa = Any Amino Acid
CCEFACNXPXAXCTXGA

SEQ ID NO: 12074 - protein, 17 aa, Artificial Sequence
  Synthetically generated peptide
  VARIANT (1)..(17): Xaa = Any Amino Acid
CCEFACNXPXAXCTGXA

SEQ ID NO: 12075 - protein, 16 aa, Artificial Sequence
  Synthetically generated peptide
  VARIANT (1)..(16): Xaa = Any Amino Acid
CCEFACNXPXACXTGA

SEQ ID NO: 12076 - protein, 17 aa, Artificial Sequence
  Synthetically generated peptide
  VARIANT (1)..(17): Xaa = Any Amino Acid
CCEFACNXPXACXXTGA

SEQ ID NO: 12077 - protein, 17 aa, Artificial Sequence
  Synthetically generated peptide
  VARIANT (1)..(17): Xaa = Any Amino Acid
CCEFACNXPXACXTXGA

SEQ ID NO: 12078 - protein, 17 aa, Artificial Sequence
  Synthetically generated peptide
  VARIANT (1)..(17): Xaa = Any Amino Acid
CCEFACNXPXACXTGXA

SEQ ID NO: 12079 - protein, 16 aa, Artificial Sequence
  Synthetically generated peptide
  VARIANT (1)..(16): Xaa = Any Amino Acid
CCEFACNXPXACTXGA

SEQ ID NO: 12080 - protein, 17 aa, Artificial Sequence
  Synthetically generated peptide
  VARIANT (1)..(17): Xaa = Any Amino Acid
CCEFACNXPXACTXXGA

SEQ ID NO: 12081 - protein, 17 aa, Artificial Sequence
  Synthetically generated peptide
  VARIANT (1)..(17): Xaa = Any Amino Acid
CCEFACNXPXACTXGXA

SEQ ID NO: 12082 - protein, 16 aa, Artificial Sequence
  Synthetically generated peptide
  VARIANT (1)..(16): Xaa = Any Amino Acid
CCEFACNXPXACTGXA

SEQ ID NO: 12083 - protein, 17 aa, Artificial Sequence
  Synthetically generated peptide
  VARIANT (1)..(17): Xaa = Any Amino Acid
CCEFACNXPXACTGXXA

SEQ ID NO: 12084 - protein, 15 aa, Artificial Sequence
  Synthetically generated peptide
  VARIANT (1)..(15): Xaa = Any Amino Acid
CCEFACNXPAXCTGA

SEQ ID NO: 12085 - protein, 16 aa, Artificial Sequence
  Synthetically generated peptide
  VARIANT (1)..(16): Xaa = Any Amino Acid
CCEFACNXPAXXCTGA

SEQ ID NO: 12086 - protein, 17 aa, Artificial Sequence
  Synthetically generated peptide
  VARIANT (1)..(17): Xaa = Any Amino Acid
CCEFACNXPAXXXCTGA

SEQ ID NO: 12087 - protein, 17 aa, Artificial Sequence
  Synthetically generated peptide
  VARIANT (1)..(17): Xaa = Any Amino Acid
CCEFACNXPAXXCXTGA

SEQ ID NO: 12088 - protein, 17 aa, Artificial Sequence
  Synthetically generated peptide
  VARIANT (1)..(17): Xaa = Any Amino Acid
CCEFACNXPAXXCTXGA

SEQ ID NO: 12089 - protein, 17 aa, Artificial Sequence
  Synthetically generated peptide
  VARIANT (1)..(17): Xaa = Any Amino Acid
CCEFACNXPAXXCTGXA

SEQ ID NO: 12090 - protein, 16 aa, Artificial Sequence
  Synthetically generated peptide
  VARIANT (1)..(16): Xaa = Any Amino Acid
CCEFACNXPAXCXTGA

SEQ ID NO: 12091 - protein, 17 aa, Artificial Sequence
  Synthetically generated peptide
  VARIANT (1)..(17): Xaa = Any Amino Acid
CCEFACNXPAXCXXTGA

SEQ ID NO: 12092 - protein, 17 aa, Artificial Sequence
  Synthetically generated peptide
  VARIANT (1)..(17): Xaa = Any Amino Acid
CCEFACNXPAXCXTXGA

SEQ ID NO: 12093 - protein, 17 aa, Artificial Sequence
  Synthetically generated peptide
  VARIANT (1)..(17): Xaa = Any Amino Acid
CCEFACNXPAXCXTGXA

SEQ ID NO: 12094 - protein, 16 aa, Artificial Sequence
  Synthetically generated peptide
  VARIANT (1)..(16): Xaa = Any Amino Acid
CCEFACNXPAXCTXGA

SEQ ID NO: 12095 - protein, 17 aa, Artificial Sequence
  Synthetically generated peptide
  VARIANT (1)..(17): Xaa = Any Amino Acid
CCEFACNXPAXCTXXGA

SEQ ID NO: 12096 - protein, 17 aa, Artificial Sequence
  Synthetically generated peptide
  VARIANT (1)..(17): Xaa = Any Amino Acid
CCEFACNXPAXCTXGXA

SEQ ID NO: 12097 - protein, 16 aa, Artificial Sequence
  Synthetically generated peptide
  VARIANT (1)..(16): Xaa = Any Amino Acid
CCEFACNXPAXCTGXA

SEQ ID NO: 12098 - protein, 17 aa, Artificial Sequence
  Synthetically generated peptide
  VARIANT (1)..(17): Xaa = Any Amino Acid
CCEFACNXPAXCTGXXA

SEQ ID NO: 12099 - protein, 15 aa, Artificial Sequence
  Synthetically generated peptide
  VARIANT (1)..(15): Xaa = Any Amino Acid
CCEFACNXPACXTGA

SEQ ID NO: 12100 - protein, 16 aa, Artificial Sequence
  Synthetically generated peptide
  VARIANT (1)..(16): Xaa = Any Amino Acid
CCEFACNXPACXXTGA

SEQ ID NO: 12101 - protein, 17 aa, Artificial Sequence
  Synthetically generated peptide
  VARIANT (1)..(17): Xaa = Any Amino Acid
CCEFACNXPACXXXTGA

SEQ ID NO: 12102 - protein, 17 aa, Artificial Sequence
  Synthetically generated peptide
  VARIANT (1)..(17): Xaa = Any Amino Acid
CCEFACNXPACXXTXGA

SEQ ID NO: 12103 - protein, 17 aa, Artificial Sequence
  Synthetically generated peptide
  VARIANT (1)..(17): Xaa = Any Amino Acid
CCEFACNXPACXXTGXA

SEQ ID NO: 12104 - protein, 16 aa, Artificial Sequence
  Synthetically generated peptide
  VARIANT (1)..(16): Xaa = Any Amino Acid
CCEFACNXPACXTXGA

SEQ ID NO: 12105 - protein, 17 aa, Artificial Sequence
  Synthetically generated peptide
  VARIANT (1)..(17): Xaa = Any Amino Acid
CCEFACNXPACXTXXGA

SEQ ID NO: 12106 - protein, 17 aa, Artificial Sequence
  Synthetically generated peptide
  VARIANT (1)..(17): Xaa = Any Amino Acid
CCEFACNXPACXTXGXA

SEQ ID NO: 12107 - protein, 16 aa, Artificial Sequence
  Synthetically generated peptide
  VARIANT (1)..(16): Xaa = Any Amino Acid
CCEFACNXPACXTGXA

SEQ ID NO: 12108 - protein, 17 aa, Artificial Sequence
  Synthetically generated peptide
  VARIANT (1)..(17): Xaa = Any Amino Acid
CCEFACNXPACXTGXXA

SEQ ID NO: 12109 - protein, 15 aa, Artificial Sequence
  Synthetically generated peptide
  VARIANT (1)..(15): Xaa = Any Amino Acid
CCEFACNXPACTXGA

SEQ ID NO: 12110 - protein, 16 aa, Artificial Sequence
  Synthetically generated peptide
  VARIANT (1)..(16): Xaa = Any Amino Acid
CCEFACNXPACTXXGA

SEQ ID NO: 12111 - protein, 17 aa, Artificial Sequence
  Synthetically generated peptide
  VARIANT (1)..(17): Xaa = Any Amino Acid
CCEFACNXPACTXXXGA

SEQ ID NO: 12112 - protein, 17 aa, Artificial Sequence
  Synthetically generated peptide
  VARIANT (1)..(17): Xaa = Any Amino Acid
CCEFACNXPACTXXGXA

SEQ ID NO: 12113 - protein, 16 aa, Artificial Sequence
  Synthetically generated peptide
  VARIANT (1)..(16): Xaa = Any Amino Acid
CCEFACNXPACTXGXA

SEQ ID NO: 12114 - protein, 17 aa, Artificial Sequence
  Synthetically generated peptide
  VARIANT (1)..(17): Xaa = Any Amino Acid
CCEFACNXPACTXGXXA

SEQ ID NO: 12115 - protein, 15 aa, Artificial Sequence
  Synthetically generated peptide
  VARIANT (1)..(15): Xaa = Any Amino Acid
CCEFACNXPACTGXA

SEQ ID NO: 12116 - protein, 16 aa, Artificial Sequence
  Synthetically generated peptide
  VARIANT (1)..(16): Xaa = Any Amino Acid
CCEFACNXPACTGXXA

SEQ ID NO: 12117 - protein, 17 aa, Artificial Sequence
  Synthetically generated peptide
  VARIANT (1)..(17): Xaa = Any Amino Acid
CCEFACNXPACTGXXXA

SEQ ID NO: 12118 - protein, 14 aa, Artificial Sequence
  Synthetically generated peptide
  VARIANT (1)..(14): Xaa = Any Amino Acid
CCEFACNPXACTGA

SEQ ID NO: 12119 - protein, 15 aa, Artificial Sequence
  Synthetically generated peptide
  VARIANT (1)..(15): Xaa = Any Amino Acid
CCEFACNPXXACTGA

SEQ ID NO: 12120 - protein, 16 aa, Artificial Sequence
  Synthetically generated peptide
  VARIANT (1)..(16): Xaa = Any Amino Acid
CCEFACNPXXXACTGA

SEQ ID NO: 12121 - protein, 17 aa, Artificial Sequence
  Synthetically generated peptide
  VARIANT (1)..(17): Xaa = Any Amino Acid
CCEFACNPXXXXACTGA

SEQ ID NO: 12122 - protein, 17 aa, Artificial Sequence
  Synthetically generated peptide
  VARIANT (1)..(17): Xaa = Any Amino Acid
CCEFACNPXXXAXCTGA

SEQ ID NO: 12123 - protein, 17 aa, Artificial Sequence
  Synthetically generated peptide
  VARIANT (1)..(17): Xaa = Any Amino Acid
CCEFACNPXXXACXTGA

SEQ ID NO: 12124 - protein, 17 aa, Artificial Sequence
  Synthetically generated peptide
  VARIANT (1)..(17): Xaa = Any Amino Acid
CCEFACNPXXXACTXGA

SEQ ID NO: 12125 - protein, 17 aa, Artificial Sequence
  Synthetically generated peptide
  VARIANT (1)..(17): Xaa = Any Amino Acid
CCEFACNPXXXACTGXA

SEQ ID NO: 12126 - protein, 16 aa, Artificial Sequence
  Synthetically generated peptide
  VARIANT (1)..(16): Xaa = Any Amino Acid
CCEFACNPXXAXCTGA

SEQ ID NO: 12127 - protein, 17 aa, Artificial Sequence
  Synthetically generated peptide
  VARIANT (1)..(17): Xaa = Any Amino Acid
CCEFACNPXXAXXCTGA

SEQ ID NO: 12128 - protein, 17 aa, Artificial Sequence
  Synthetically generated peptide
  VARIANT (1)..(17): Xaa = Any Amino Acid
CCEFACNPXXAXCXTGA

SEQ ID NO: 12129 - protein, 17 aa, Artificial Sequence
  Synthetically generated peptide
  VARIANT (1)..(17): Xaa = Any Amino Acid
CCEFACNPXXAXCTXGA

SEQ ID NO: 12130 - protein, 17 aa, Artificial Sequence
  Synthetically generated peptide
  VARIANT (1)..(17): Xaa = Any Amino Acid
CCEFACNPXXAXCTGXA

SEQ ID NO: 12131 - protein, 16 aa, Artificial Sequence
  Synthetically generated peptide
  VARIANT (1)..(16): Xaa = Any Amino Acid
CCEFACNPXXACXTGA

SEQ ID NO: 12132 - protein, 17 aa, Artificial Sequence
  Synthetically generated peptide
  VARIANT (1)..(17): Xaa = Any Amino Acid
CCEFACNPXXACXXTGA

SEQ ID NO: 12133 - protein, 17 aa, Artificial Sequence
  Synthetically generated peptide
  VARIANT (1)..(17): Xaa = Any Amino Acid
CCEFACNPXXACXTXGA

SEQ ID NO: 12134 - protein, 17 aa, Artificial Sequence
  Synthetically generated peptide
  VARIANT (1)..(17): Xaa = Any Amino Acid
CCEFACNPXXACXTGXA

SEQ ID NO: 12135 - protein, 16 aa, Artificial Sequence
  Synthetically generated peptide
  VARIANT (1)..(16): Xaa = Any Amino Acid
CCEFACNPXXACTXGA

SEQ ID NO: 12136 - protein, 17 aa, Artificial Sequence
  Synthetically generated peptide
  VARIANT (1)..(17): Xaa = Any Amino Acid
CCEFACNPXXACTXXGA

SEQ ID NO: 12137 - protein, 17 aa, Artificial Sequence
  Synthetically generated peptide
  VARIANT (1)..(17): Xaa = Any Amino Acid
CCEFACNPXXACTXGXA

SEQ ID NO: 12138 - protein, 16 aa, Artificial Sequence
  Synthetically generated peptide
  VARIANT (1)..(16): Xaa = Any Amino Acid
CCEFACNPXXACTGXA

SEQ ID NO: 12139 - protein, 17 aa, Artificial Sequence
  Synthetically generated peptide
  VARIANT (1)..(17): Xaa = Any Amino Acid
CCEFACNPXXACTGXXA

SEQ ID NO: 12140 - protein, 15 aa, Artificial Sequence
  Synthetically generated peptide
  VARIANT (1)..(15): Xaa = Any Amino Acid
CCEFACNPXAXCTGA

SEQ ID NO: 12141 - protein, 16 aa, Artificial Sequence
  Synthetically generated peptide
  VARIANT (1)..(16): Xaa = Any Amino Acid
CCEFACNPXAXXCTGA

SEQ ID NO: 12142 - protein, 17 aa, Artificial Sequence
  Synthetically generated peptide
  VARIANT (1)..(17): Xaa = Any Amino Acid
CCEFACNPXAXXXCTGA

SEQ ID NO: 12143 - protein, 17 aa, Artificial Sequence
  Synthetically generated peptide
  VARIANT (1)..(17): Xaa = Any Amino Acid
CCEFACNPXAXXCXTGA

SEQ ID NO: 12144 - protein, 17 aa, Artificial Sequence
  Synthetically generated peptide
  VARIANT (1)..(17): Xaa = Any Amino Acid
CCEFACNPXAXXCTXGA

SEQ ID NO: 12145 - protein, 17 aa, Artificial Sequence
  Synthetically generated peptide
  VARIANT (1)..(17): Xaa = Any Amino Acid
CCEFACNPXAXXCTGXA

SEQ ID NO: 12146 - protein, 16 aa, Artificial Sequence
  Synthetically generated peptide
  VARIANT (1)..(16): Xaa = Any Amino Acid
CCEFACNPXAXCXTGA

SEQ ID NO: 12147 - protein, 17 aa, Artificial Sequence
  Synthetically generated peptide
  VARIANT (1)..(17): Xaa = Any Amino Acid
CCEFACNPXAXCXXTGA

SEQ ID NO: 12148 - protein, 17 aa, Artificial Sequence
  Synthetically generated peptide
  VARIANT (1)..(17): Xaa = Any Amino Acid
CCEFACNPXAXCXTXGA

SEQ ID NO: 12149 - protein, 17 aa, Artificial Sequence
  Synthetically generated peptide
  VARIANT (1)..(17): Xaa = Any Amino Acid
CCEFACNPXAXCXTGXA

SEQ ID NO: 12150 - protein, 16 aa, Artificial Sequence
  Synthetically generated peptide
  VARIANT (1)..(16): Xaa = Any Amino Acid
CCEFACNPXAXCTXGA

SEQ ID NO: 12151 - protein, 17 aa, Artificial Sequence
  Synthetically generated peptide
  VARIANT (1)..(17): Xaa = Any Amino Acid
CCEFACNPXAXCTXXGA

SEQ ID NO: 12152 - protein, 17 aa, Artificial Sequence
  Synthetically generated peptide
  VARIANT (1)..(17): Xaa = Any Amino Acid
CCEFACNPXAXCTXGXA

SEQ ID NO: 12153 - protein, 16 aa, Artificial Sequence
  Synthetically generated peptide
  VARIANT (1)..(16): Xaa = Any Amino Acid
CCEFACNPXAXCTGXA

SEQ ID NO: 12154 - protein, 17 aa, Artificial Sequence
  Synthetically generated peptide
  VARIANT (1)..(17): Xaa = Any Amino Acid
CCEFACNPXAXCTGXXA

SEQ ID NO: 12155 - protein, 15 aa, Artificial Sequence
  Synthetically generated peptide
  VARIANT (1)..(15): Xaa = Any Amino Acid
CCEFACNPXACXTGA

SEQ ID NO: 12156 - protein, 16 aa, Artificial Sequence
  Synthetically generated peptide
  VARIANT (1)..(16): Xaa = Any Amino Acid
CCEFACNPXACXXTGA

SEQ ID NO: 12157 - protein, 17 aa, Artificial Sequence
  Synthetically generated peptide
  VARIANT (1)..(17): Xaa = Any Amino Acid
CCEFACNPXACXXXTGA

SEQ ID NO: 12158 - protein, 17 aa, Artificial Sequence
  Synthetically generated peptide
  VARIANT (1)..(17): Xaa = Any Amino Acid
CCEFACNPXACXXTXGA

SEQ ID NO: 12159 - protein, 17 aa, Artificial Sequence
  Synthetically generated peptide
  VARIANT (1)..(17): Xaa = Any Amino Acid
CCEFACNPXACXXTGXA

SEQ ID NO: 12160 - protein, 16 aa, Artificial Sequence
  Synthetically generated peptide
  VARIANT (1)..(16): Xaa = Any Amino Acid
CCEFACNPXACXTXGA

SEQ ID NO: 12161 - protein, 17 aa, Artificial Sequence
  Synthetically generated peptide
  VARIANT (1)..(17): Xaa = Any Amino Acid
CCEFACNPXACXTXXGA

SEQ ID NO: 12162 - protein, 17 aa, Artificial Sequence
  Synthetically generated peptide
  VARIANT (1)..(17): Xaa = Any Amino Acid
CCEFACNPXACXTXGXA

SEQ ID NO: 12163 - protein, 16 aa, Artificial Sequence
  Synthetically generated peptide
  VARIANT (1)..(16): Xaa = Any Amino Acid
CCEFACNPXACXTGXA

SEQ ID NO: 12164 - protein, 17 aa, Artificial Sequence
  Synthetically generated peptide
  VARIANT (1)..(17): Xaa = Any Amino Acid
CCEFACNPXACXTGXXA

SEQ ID NO: 12165 - protein, 15 aa, Artificial Sequence
  Synthetically generated peptide
  VARIANT (1)..(15): Xaa = Any Amino Acid
CCEFACNPXACTXGA

SEQ ID NO: 12166 - protein, 16 aa, Artificial Sequence
  Synthetically generated peptide
  VARIANT (1)..(16): Xaa = Any Amino Acid
CCEFACNPXACTXXGA

SEQ ID NO: 12167 - protein, 17 aa, Artificial Sequence
  Synthetically generated peptide
  VARIANT (1)..(17): Xaa = Any Amino Acid
CCEFACNPXACTXXXGA

SEQ ID NO: 12168 - protein, 17 aa, Artificial Sequence
  Synthetically generated peptide
  VARIANT (1)..(17): Xaa = Any Amino Acid
CCEFACNPXACTXXGXA

SEQ ID NO: 12169 - protein, 16 aa, Artificial Sequence
  Synthetically generated peptide
  VARIANT (1)..(16): Xaa = Any Amino Acid
CCEFACNPXACTXGXA

SEQ ID NO: 12170 - protein, 17 aa, Artificial Sequence
  Synthetically generated peptide
  VARIANT (1)..(17): Xaa = Any Amino Acid
CCEFACNPXACTXGXXA

SEQ ID NO: 12171 - protein, 15 aa, Artificial Sequence
  Synthetically generated peptide
  VARIANT (1)..(15): Xaa = Any Amino Acid
CCEFACNPXACTGXA

SEQ ID NO: 12172 - protein, 16 aa, Artificial Sequence
  Synthetically generated peptide
  VARIANT (1)..(16): Xaa = Any Amino Acid
CCEFACNPXACTGXXA

SEQ ID NO: 12173 - protein, 17 aa, Artificial Sequence
  Synthetically generated peptide
  VARIANT (1)..(17): Xaa = Any Amino Acid
CCEFACNPXACTGXXXA

SEQ ID NO: 12174 - protein, 14 aa, Artificial Sequence
  Synthetically generated peptide
  VARIANT (1)..(14): Xaa = Any Amino Acid
CCEFACNPAXCTGA

SEQ ID NO: 12175 - protein, 15 aa, Artificial Sequence
  Synthetically generated peptide
  VARIANT (1)..(15): Xaa = Any Amino Acid
CCEFACNPAXXCTGA

SEQ ID NO: 12176 - protein, 16 aa, Artificial Sequence
  Synthetically generated peptide
  VARIANT (1)..(16): Xaa = Any Amino Acid
CCEFACNPAXXXCTGA

SEQ ID NO: 12177 - protein, 17 aa, Artificial Sequence
  Synthetically generated peptide
  VARIANT (1)..(17): Xaa = Any Amino Acid
CCEFACNPAXXXXCTGA

SEQ ID NO: 12178 - protein, 17 aa, Artificial Sequence
  Synthetically generated peptide
  VARIANT (1)..(17): Xaa = Any Amino Acid
CCEFACNPAXXXCXTGA

SEQ ID NO: 12179 - protein, 17 aa, Artificial Sequence
  Synthetically generated peptide
  VARIANT (1)..(17): Xaa = Any Amino Acid
CCEFACNPAXXXCTXGA

SEQ ID NO: 12180 - protein, 17 aa, Artificial Sequence
  Synthetically generated peptide
  VARIANT (1)..(17): Xaa = Any Amino Acid
CCEFACNPAXXXCTGXA

SEQ ID NO: 12181 - protein, 16 aa, Artificial Sequence
  Synthetically generated peptide
  VARIANT (1)..(16): Xaa = Any Amino Acid
CCEFACNPAXXCXTGA

SEQ ID NO: 12182 - protein, 17 aa, Artificial Sequence
  Synthetically generated peptide
  VARIANT (1)..(17): Xaa = Any Amino Acid
CCEFACNPAXXCXXTGA

SEQ ID NO: 12183 - protein, 17 aa, Artificial Sequence
  Synthetically generated peptide
  VARIANT (1)..(17): Xaa = Any Amino Acid
CCEFACNPAXXCXTXGA

SEQ ID NO: 12184 - protein, 17 aa, Artificial Sequence
  Synthetically generated peptide
  VARIANT (1)..(17): Xaa = Any Amino Acid
CCEFACNPAXXCXTGXA

SEQ ID NO: 12185 - protein, 16 aa, Artificial Sequence
  Synthetically generated peptide
  VARIANT (1)..(16): Xaa = Any Amino Acid
CCEFACNPAXXCTXGA

SEQ ID NO: 12186 - protein, 17 aa, Artificial Sequence
  Synthetically generated peptide
  VARIANT (1)..(17): Xaa = Any Amino Acid
CCEFACNPAXXCTXXGA

SEQ ID NO: 12187 - protein, 17 aa, Artificial Sequence
  Synthetically generated peptide
  VARIANT (1)..(17): Xaa = Any Amino Acid
CCEFACNPAXXCTXGXA

SEQ ID NO: 12188 - protein, 16 aa, Artificial Sequence
  Synthetically generated peptide
  VARIANT (1)..(16): Xaa = Any Amino Acid
CCEFACNPAXXCTGXA

SEQ ID NO: 12189 - protein, 17 aa, Artificial Sequence
  Synthetically generated peptide
  VARIANT (1)..(17): Xaa = Any Amino Acid
CCEFACNPAXXCTGXXA

SEQ ID NO: 12190 - protein, 15 aa, Artificial Sequence
  Synthetically generated peptide
  VARIANT (1)..(15): Xaa = Any Amino Acid
CCEFACNPAXCXTGA

SEQ ID NO: 12191 - protein, 16 aa, Artificial Sequence
  Synthetically generated peptide
  VARIANT (1)..(16): Xaa = Any Amino Acid
CCEFACNPAXCXXTGA

SEQ ID NO: 12192 - protein, 17 aa, Artificial Sequence
  Synthetically generated peptide
  VARIANT (1)..(17): Xaa = Any Amino Acid
CCEFACNPAXCXXXTGA

SEQ ID NO: 12193 - protein, 17 aa, Artificial Sequence
  Synthetically generated peptide
  VARIANT (1)..(17): Xaa = Any Amino Acid
CCEFACNPAXCXXTXGA

SEQ ID NO: 12194 - protein, 17 aa, Artificial Sequence
  Synthetically generated peptide
  VARIANT (1)..(17): Xaa = Any Amino Acid
CCEFACNPAXCXXTGXA

SEQ ID NO: 12195 - protein, 16 aa, Artificial Sequence
  Synthetically generated peptide
  VARIANT (1)..(16): Xaa = Any Amino Acid
CCEFACNPAXCXTXGA

SEQ ID NO: 12196 - protein, 17 aa, Artificial Sequence
  Synthetically generated peptide
  VARIANT (1)..(17): Xaa = Any Amino Acid
CCEFACNPAXCXTXXGA

SEQ ID NO: 12197 - protein, 17 aa, Artificial Sequence
  Synthetically generated peptide
  VARIANT (1)..(17): Xaa = Any Amino Acid
CCEFACNPAXCXTXGXA

SEQ ID NO: 12198 - protein, 16 aa, Artificial Sequence
  Synthetically generated peptide
  VARIANT (1)..(16): Xaa = Any Amino Acid
CCEFACNPAXCXTGXA

SEQ ID NO: 12199 - protein, 17 aa, Artificial Sequence
  Synthetically generated peptide
  VARIANT (1)..(17): Xaa = Any Amino Acid
CCEFACNPAXCXTGXXA

SEQ ID NO: 12200 - protein, 15 aa, Artificial Sequence
  Synthetically generated peptide
  VARIANT (1)..(15): Xaa = Any Amino Acid
CCEFACNPAXCTXGA

SEQ ID NO: 12201 - protein, 16 aa, Artificial Sequence
  Synthetically generated peptide
  VARIANT (1)..(16): Xaa = Any Amino Acid
CCEFACNPAXCTXXGA

SEQ ID NO: 12202 - protein, 17 aa, Artificial Sequence
  Synthetically generated peptide
  VARIANT (1)..(17): Xaa = Any Amino Acid
CCEFACNPAXCTXXXGA

SEQ ID NO: 12203 - protein, 17 aa, Artificial Sequence
  Synthetically generated peptide
  VARIANT (1)..(17): Xaa = Any Amino Acid
CCEFACNPAXCTXXGXA

SEQ ID NO: 12204 - protein, 16 aa, Artificial Sequence
  Synthetically generated peptide
  VARIANT (1)..(16): Xaa = Any Amino Acid
CCEFACNPAXCTXGXA

SEQ ID NO: 12205 - protein, 17 aa, Artificial Sequence
  Synthetically generated peptide
  VARIANT (1)..(17): Xaa = Any Amino Acid
CCEFACNPAXCTXGXXA

SEQ ID NO: 12206 - protein, 15 aa, Artificial Sequence
  Synthetically generated peptide
  VARIANT (1)..(15): Xaa = Any Amino Acid
CCEFACNPAXCTGXA

SEQ ID NO: 12207 - protein, 16 aa, Artificial Sequence
  Synthetically generated peptide
  VARIANT (1)..(16): Xaa = Any Amino Acid
CCEFACNPAXCTGXXA

SEQ ID NO: 12208 - protein, 17 aa, Artificial Sequence
  Synthetically generated peptide
  VARIANT (1)..(17): Xaa = Any Amino Acid
CCEFACNPAXCTGXXXA

SEQ ID NO: 12209 - protein, 14 aa, Artificial Sequence
  Synthetically generated peptide
  VARIANT (1)..(14): Xaa = Any Amino Acid
CCEFACNPACXTGA

SEQ ID NO: 12210 - protein, 15 aa, Artificial Sequence
  Synthetically generated peptide
  VARIANT (1)..(15): Xaa = Any Amino Acid
CCEFACNPACXXTGA

SEQ ID NO: 12211 - protein, 16 aa, Artificial Sequence
  Synthetically generated peptide
  VARIANT (1)..(16): Xaa = Any Amino Acid
CCEFACNPACXXXTGA

SEQ ID NO: 12212 - protein, 17 aa, Artificial Sequence
  Synthetically generated peptide
  VARIANT (1)..(17): Xaa = Any Amino Acid
CCEFACNPACXXXXTGA

SEQ ID NO: 12213 - protein, 17 aa, Artificial Sequence
  Synthetically generated peptide
  VARIANT (1)..(17): Xaa = Any Amino Acid
CCEFACNPACXXXTXGA

SEQ ID NO: 12214 - protein, 17 aa, Artificial Sequence
  Synthetically generated peptide
  VARIANT (1)..(17): Xaa = Any Amino Acid
CCEFACNPACXXXTGXA

SEQ ID NO: 12215 - protein, 16 aa, Artificial Sequence
  Synthetically generated peptide
  VARIANT (1)..(16): Xaa = Any Amino Acid
CCEFACNPACXXTXGA

SEQ ID NO: 12216 - protein, 17 aa, Artificial Sequence
  Synthetically generated peptide
  VARIANT (1)..(17): Xaa = Any Amino Acid
CCEFACNPACXXTXXGA

SEQ ID NO: 12217 - protein, 17 aa, Artificial Sequence
  Synthetically generated peptide
  VARIANT (1)..(17): Xaa = Any Amino Acid
CCEFACNPACXXTXGXA

SEQ ID NO: 12218 - protein, 16 aa, Artificial Sequence
  Synthetically generated peptide
  VARIANT (1)..(16): Xaa = Any Amino Acid
CCEFACNPACXXTGXA

SEQ ID NO: 12219 - protein, 17 aa, Artificial Sequence
  Synthetically generated peptide
  VARIANT (1)..(17): Xaa = Any Amino Acid
CCEFACNPACXXTGXXA

SEQ ID NO: 12220 - protein, 15 aa, Artificial Sequence
  Synthetically generated peptide
  VARIANT (1)..(15): Xaa = Any Amino Acid
CCEFACNPACXTXGA

SEQ ID NO: 12221 - protein, 16 aa, Artificial Sequence
  Synthetically generated peptide
  VARIANT (1)..(16): Xaa = Any Amino Acid
CCEFACNPACXTXXGA

SEQ ID NO: 12222 - protein, 17 aa, Artificial Sequence
  Synthetically generated peptide
  VARIANT (1)..(17): Xaa = Any Amino Acid
CCEFACNPACXTXXXGA

SEQ ID NO: 12223 - protein, 17 aa, Artificial Sequence
  Synthetically generated peptide
  VARIANT (1)..(17): Xaa = Any Amino Acid
CCEFACNPACXTXXGXA

SEQ ID NO: 12224 - protein, 16 aa, Artificial Sequence
  Synthetically generated peptide
  VARIANT (1)..(16): Xaa = Any Amino Acid
CCEFACNPACXTXGXA

SEQ ID NO: 12225 - protein, 17 aa, Artificial Sequence
  Synthetically generated peptide
  VARIANT (1)..(17): Xaa = Any Amino Acid
CCEFACNPACXTXGXXA

SEQ ID NO: 12226 - protein, 15 aa, Artificial Sequence
  Synthetically generated peptide
  VARIANT (1)..(15): Xaa = Any Amino Acid
CCEFACNPACXTGXA

SEQ ID NO: 12227 - protein, 16 aa, Artificial Sequence
  Synthetically generated peptide
  VARIANT (1)..(16): Xaa = Any Amino Acid
CCEFACNPACXTGXXA

SEQ ID NO: 12228 - protein, 17 aa, Artificial Sequence
  Synthetically generated peptide
  VARIANT (1)..(17): Xaa = Any Amino Acid
CCEFACNPACXTGXXXA

SEQ ID NO: 12229 - protein, 14 aa, Artificial Sequence
  Synthetically generated peptide
  VARIANT (1)..(14): Xaa = Any Amino Acid
CCEFACNPACTXGA

SEQ ID NO: 12230 - protein, 15 aa, Artificial Sequence
  Synthetically generated peptide
  VARIANT (1)..(15): Xaa = Any Amino Acid
CCEFACNPACTXXGA

SEQ ID NO: 12231 - protein, 16 aa, Artificial Sequence
  Synthetically generated peptide
  VARIANT (1)..(16): Xaa = Any Amino Acid
CCEFACNPACTXXXGA

SEQ ID NO: 12232 - protein, 17 aa, Artificial Sequence
  Synthetically generated peptide
  VARIANT (1)..(17): Xaa = Any Amino Acid
CCEFACNPACTXXXXGA

SEQ ID NO: 12233 - protein, 17 aa, Artificial Sequence
  Synthetically generated peptide
  VARIANT (1)..(17): Xaa = Any Amino Acid
CCEFACNPACTXXXGXA

SEQ ID NO: 12234 - protein, 16 aa, Artificial Sequence
  Synthetically generated peptide
  VARIANT (1)..(16): Xaa = Any Amino Acid
CCEFACNPACTXXGXA

SEQ ID NO: 12235 - protein, 17 aa, Artificial Sequence
  Synthetically generated peptide
  VARIANT (1)..(17): Xaa = Any Amino Acid
CCEFACNPACTXXGXXA

SEQ ID NO: 12236 - protein, 15 aa, Artificial Sequence
  Synthetically generated peptide
  VARIANT (1)..(15): Xaa = Any Amino Acid
CCEFACNPACTXGXA

SEQ ID NO: 12237 - protein, 16 aa, Artificial Sequence
  Synthetically generated peptide
  VARIANT (1)..(16): Xaa = Any Amino Acid
CCEFACNPACTXGXXA

SEQ ID NO: 12238 - protein, 17 aa, Artificial Sequence
  Synthetically generated peptide
  VARIANT (1)..(17): Xaa = Any Amino Acid
CCEFACNPACTXGXXXA

SEQ ID NO: 12239 - protein, 14 aa, Artificial Sequence
  Synthetically generated peptide
  VARIANT (1)..(14): Xaa = Any Amino Acid
CCEFACNPACTGXA

SEQ ID NO: 12240 - protein, 15 aa, Artificial Sequence
  Synthetically generated peptide
  VARIANT (1)..(15): Xaa = Any Amino Acid
CCEFACNPACTGXXA

SEQ ID NO: 12241 - protein, 16 aa, Artificial Sequence
  Synthetically generated peptide
  VARIANT (1)..(16): Xaa = Any Amino Acid
CCEFACNPACTGXXXA

SEQ ID NO: 12242 - protein, 17 aa, Artificial Sequence
  Synthetically generated peptide
  VARIANT (1)..(17): Xaa = Any Amino Acid
CCEFACNPACTGXXXXA

SEQ ID NO: 12243 - protein, 14 aa, Artificial Sequence
  Synthetically generated peptide
  VARIANT (1)..(14): Xaa = Any Amino Acid
ACXEWCANPACTGC

SEQ ID NO: 12244 - protein, 15 aa, Artificial Sequence
  Synthetically generated peptide
  VARIANT (1)..(15): Xaa = Any Amino Acid
ACXXEWCANPACTGC

SEQ ID NO: 12245 - protein, 16 aa, Artificial Sequence
  Synthetically generated peptide
  VARIANT (1)..(16): Xaa = Any Amino Acid
ACXXXEWCANPACTGC

SEQ ID NO: 12246 - protein, 17 aa, Artificial Sequence
  Synthetically generated peptide
  VARIANT (1)..(17): Xaa = Any Amino Acid
ACXXXXEWCANPACTGC

SEQ ID NO: 12247 - protein, 17 aa, Artificial Sequence
  Synthetically generated peptide
  VARIANT (1)..(17): Xaa = Any Amino Acid
ACXXXEXWCANPACTGC

SEQ ID NO: 12248 - protein, 17 aa, Artificial Sequence
  Synthetically generated peptide
  VARIANT (1)..(17): Xaa = Any Amino Acid
ACXXXEWXCANPACTGC

SEQ ID NO: 12249 - protein, 17 aa, Artificial Sequence
  Synthetically generated peptide
  VARIANT (1)..(17): Xaa = Any Amino Acid
ACXXXEWCAXNPACTGC

SEQ ID NO: 12250 - protein, 17 aa, Artificial Sequence
  Synthetically generated peptide
  VARIANT (1)..(17): Xaa = Any Amino Acid
ACXXXEWCANXPACTGC

SEQ ID NO: 12251 - protein, 17 aa, Artificial Sequence
  Synthetically generated peptide
  VARIANT (1)..(17): Xaa = Any Amino Acid
ACXXXEWCANPXACTGC

SEQ ID NO: 12252 - protein, 17 aa, Artificial Sequence
  Synthetically generated peptide
  VARIANT (1)..(17): Xaa = Any Amino Acid
ACXXXEWCANPAXCTGC

SEQ ID NO: 12253 - protein, 17 aa, Artificial Sequence
  Synthetically generated peptide
  VARIANT (1)..(17): Xaa = Any Amino Acid
ACXXXEWCANPACXTGC

SEQ ID NO: 12254 - protein, 17 aa, Artificial Sequence
  Synthetically generated peptide
  VARIANT (1)..(17): Xaa = Any Amino Acid
ACXXXEWCANPACTXGC

SEQ ID NO: 12255 - protein, 17 aa, Artificial Sequence
  Synthetically generated peptide
  VARIANT (1)..(17): Xaa = Any Amino Acid
ACXXXEWCANPACTGXC

SEQ ID NO: 12256 - protein, 16 aa, Artificial Sequence
  Synthetically generated peptide
  VARIANT (1)..(16): Xaa = Any Amino Acid
ACXXEXWCANPACTGC

SEQ ID NO: 12257 - protein, 17 aa, Artificial Sequence
  Synthetically generated peptide
  VARIANT (1)..(17): Xaa = Any Amino Acid
ACXXEXXWCANPACTGC

SEQ ID NO: 12258 - protein, 17 aa, Artificial Sequence
  Synthetically generated peptide
  VARIANT (1)..(17): Xaa = Any Amino Acid
ACXXEXWXCANPACTGC

SEQ ID NO: 12259 - protein, 17 aa, Artificial Sequence
  Synthetically generated peptide
  VARIANT (1)..(17): Xaa = Any Amino Acid
ACXXEXWCAXNPACTGC

SEQ ID NO: 12260 - protein, 17 aa, Artificial Sequence
  Synthetically generated peptide
  VARIANT (1)..(17): Xaa = Any Amino Acid
ACXXEXWCANXPACTGC

SEQ ID NO: 12261 - protein, 17 aa, Artificial Sequence
  Synthetically generated peptide
  VARIANT (1)..(17): Xaa = Any Amino Acid
ACXXEXWCANPXACTGC

SEQ ID NO: 12262 - protein, 17 aa, Artificial Sequence
  Synthetically generated peptide
  VARIANT (1)..(17): Xaa = Any Amino Acid
ACXXEXWCANPAXCTGC

SEQ ID NO: 12263 - protein, 17 aa, Artificial Sequence
  Synthetically generated peptide
  VARIANT (1)..(17): Xaa = Any Amino Acid
ACXXEXWCANPACXTGC

SEQ ID NO: 12264 - protein, 17 aa, Artificial Sequence
  Synthetically generated peptide
  VARIANT (1)..(17): Xaa = Any Amino Acid
ACXXEXWCANPACTXGC

SEQ ID NO: 12265 - protein, 17 aa, Artificial Sequence
  Synthetically generated peptide
  VARIANT (1)..(17): Xaa = Any Amino Acid
ACXXEXWCANPACTGXC

SEQ ID NO: 12266 - protein, 16 aa, Artificial Sequence
  Synthetically generated peptide
  VARIANT (1)..(16): Xaa = Any Amino Acid
ACXXEWXCANPACTGC

SEQ ID NO: 12267 - protein, 17 aa, Artificial Sequence
  Synthetically generated peptide
  VARIANT (1)..(17): Xaa = Any Amino Acid
ACXXEWXXCANPACTGC

SEQ ID NO: 12268 - protein, 17 aa, Artificial Sequence
  Synthetically generated peptide
  VARIANT (1)..(17): Xaa = Any Amino Acid
ACXXEWXCAXNPACTGC

SEQ ID NO: 12269 - protein, 17 aa, Artificial Sequence
  Synthetically generated peptide
  VARIANT (1)..(17): Xaa = Any Amino Acid
ACXXEWXCANXPACTGC

SEQ ID NO: 12270 - protein, 17 aa, Artificial Sequence
  Synthetically generated peptide
  VARIANT (1)..(17): Xaa = Any Amino Acid
ACXXEWXCANPXACTGC

SEQ ID NO: 12271 - protein, 17 aa, Artificial Sequence
  Synthetically generated peptide
  VARIANT (1)..(17): Xaa = Any Amino Acid
ACXXEWXCANPAXCTGC

SEQ ID NO: 12272 - protein, 17 aa, Artificial Sequence
  Synthetically generated peptide
  VARIANT (1)..(17): Xaa = Any Amino Acid
ACXXEWXCANPACXTGC

SEQ ID NO: 12273 - protein, 17 aa, Artificial Sequence
  Synthetically generated peptide
  VARIANT (1)..(17): Xaa = Any Amino Acid
ACXXEWXCANPACTXGC

SEQ ID NO: 12274 - protein, 17 aa, Artificial Sequence
  Synthetically generated peptide
  VARIANT (1)..(17): Xaa = Any Amino Acid
ACXXEWXCANPACTGXC

SEQ ID NO: 12275 - protein, 16 aa, Artificial Sequence
  Synthetically generated peptide
  VARIANT (1)..(16): Xaa = Any Amino Acid
ACXXEWCAXNPACTGC

SEQ ID NO: 12276 - protein, 17 aa, Artificial Sequence
  Synthetically generated peptide
  VARIANT (1)..(17): Xaa = Any Amino Acid
ACXXEWCAXXNPACTGC

SEQ ID NO: 12277 - protein, 17 aa, Artificial Sequence
  Synthetically generated peptide
  VARIANT (1)..(17): Xaa = Any Amino Acid
ACXXEWCAXNXPACTGC

SEQ ID NO: 12278 - protein, 17 aa, Artificial Sequence
  Synthetically generated peptide
  VARIANT (1)..(17): Xaa = Any Amino Acid
ACXXEWCAXNPXACTGC

SEQ ID NO: 12279 - protein, 17 aa, Artificial Sequence
  Synthetically generated peptide
  VARIANT (1)..(17): Xaa = Any Amino Acid
ACXXEWCAXNPAXCTGC

SEQ ID NO: 12280 - protein, 17 aa, Artificial Sequence
  Synthetically generated peptide
  VARIANT (1)..(17): Xaa = Any Amino Acid
ACXXEWCAXNPACXTGC

SEQ ID NO: 12281 - protein, 17 aa, Artificial Sequence
  Synthetically generated peptide
  VARIANT (1)..(17): Xaa = Any Amino Acid
ACXXEWCAXNPACTXGC

SEQ ID NO: 12282 - protein, 17 aa, Artificial Sequence
  Synthetically generated peptide
  VARIANT (1)..(17): Xaa = Any Amino Acid
ACXXEWCAXNPACTGXC

SEQ ID NO: 12283 - protein, 16 aa, Artificial Sequence
  Synthetically generated peptide
  VARIANT (1)..(16): Xaa = Any Amino Acid
ACXXEWCANXPACTGC

SEQ ID NO: 12284 - protein, 17 aa, Artificial Sequence
  Synthetically generated peptide
  VARIANT (1)..(17): Xaa = Any Amino Acid
ACXXEWCANXXPACTGC

SEQ ID NO: 12285 - protein, 17 aa, Artificial Sequence
  Synthetically generated peptide
  VARIANT (1)..(17): Xaa = Any Amino Acid
ACXXEWCANXPXACTGC

SEQ ID NO: 12286 - protein, 17 aa, Artificial Sequence
  Synthetically generated peptide
  VARIANT (1)..(17): Xaa = Any Amino Acid
ACXXEWCANXPAXCTGC

SEQ ID NO: 12287 - protein, 17 aa, Artificial Sequence
  Synthetically generated peptide
  VARIANT (1)..(17): Xaa = Any Amino Acid
ACXXEWCANXPACXTGC

SEQ ID NO: 12288 - protein, 17 aa, Artificial Sequence
  Synthetically generated peptide
  VARIANT (1)..(17): Xaa = Any Amino Acid
ACXXEWCANXPACTXGC

SEQ ID NO: 12289 - protein, 17 aa, Artificial Sequence
  Synthetically generated peptide
  VARIANT (1)..(17): Xaa = Any Amino Acid
ACXXEWCANXPACTGXC

SEQ ID NO: 12290 - protein, 16 aa, Artificial Sequence
  Synthetically generated peptide
  VARIANT (1)..(16): Xaa = Any Amino Acid
ACXXEWCANPXACTGC

SEQ ID NO: 12291 - protein, 17 aa, Artificial Sequence
  Synthetically generated peptide
  VARIANT (1)..(17): Xaa = Any Amino Acid
ACXXEWCANPXXACTGC

SEQ ID NO: 12292 - protein, 17 aa, Artificial Sequence
  Synthetically generated peptide
  VARIANT (1)..(17): Xaa = Any Amino Acid
ACXXEWCANPXAXCTGC

SEQ ID NO: 12293 - protein, 17 aa, Artificial Sequence
  Synthetically generated peptide
  VARIANT (1)..(17): Xaa = Any Amino Acid
ACXXEWCANPXACXTGC

SEQ ID NO: 12294 - protein, 17 aa, Artificial Sequence
  Synthetically generated peptide
  VARIANT (1)..(17): Xaa = Any Amino Acid
ACXXEWCANPXACTXGC

SEQ ID NO: 12295 - protein, 17 aa, Artificial Sequence
  Synthetically generated peptide
  VARIANT (1)..(17): Xaa = Any Amino Acid
ACXXEWCANPXACTGXC

SEQ ID NO: 12296 - protein, 16 aa, Artificial Sequence
  Synthetically generated peptide
  VARIANT (1)..(16): Xaa = Any Amino Acid
ACXXEWCANPAXCTGC

SEQ ID NO: 12297 - protein, 17 aa, Artificial Sequence
  Synthetically generated peptide
  VARIANT (1)..(17): Xaa = Any Amino Acid
ACXXEWCANPAXXCTGC

SEQ ID NO: 12298 - protein, 17 aa, Artificial Sequence
  Synthetically generated peptide
  VARIANT (1)..(17): Xaa = Any Amino Acid
ACXXEWCANPAXCXTGC

SEQ ID NO: 12299 - protein, 17 aa, Artificial Sequence
  Synthetically generated peptide
  VARIANT (1)..(17): Xaa = Any Amino Acid
ACXXEWCANPAXCTXGC

SEQ ID NO: 12300 - protein, 17 aa, Artificial Sequence
  Synthetically generated peptide
  VARIANT (1)..(17): Xaa = Any Amino Acid
ACXXEWCANPAXCTGXC

SEQ ID NO: 12301 - protein, 16 aa, Artificial Sequence
  Synthetically generated peptide
  VARIANT (1)..(16): Xaa = Any Amino Acid
ACXXEWCANPACXTGC

SEQ ID NO: 12302 - protein, 17 aa, Artificial Sequence
  Synthetically generated peptide
  VARIANT (1)..(17): Xaa = Any Amino Acid
ACXXEWCANPACXXTGC

SEQ ID NO: 12303 - protein, 17 aa, Artificial Sequence
  Synthetically generated peptide
  VARIANT (1)..(17): Xaa = Any Amino Acid
ACXXEWCANPACXTXGC

SEQ ID NO: 12304 - protein, 17 aa, Artificial Sequence
  Synthetically generated peptide
  VARIANT (1)..(17): Xaa = Any Amino Acid
ACXXEWCANPACXTGXC

SEQ ID NO: 12305 - protein, 16 aa, Artificial Sequence
  Synthetically generated peptide
  VARIANT (1)..(16): Xaa = Any Amino Acid
ACXXEWCANPACTXGC

SEQ ID NO: 12306 - protein, 17 aa, Artificial Sequence
  Synthetically generated peptide
  VARIANT (1)..(17): Xaa = Any Amino Acid
ACXXEWCANPACTXXGC

SEQ ID NO: 12307 - protein, 17 aa, Artificial Sequence
  Synthetically generated peptide
  VARIANT (1)..(17): Xaa = Any Amino Acid
ACXXEWCANPACTXGXC

SEQ ID NO: 12308 - protein, 16 aa, Artificial Sequence
  Synthetically generated peptide
  VARIANT (1)..(16): Xaa = Any Amino Acid
ACXXEWCANPACTGXC

SEQ ID NO: 12309 - protein, 17 aa, Artificial Sequence
  Synthetically generated peptide
  VARIANT (1)..(17): Xaa = Any Amino Acid
ACXXEWCANPACTGXXC

SEQ ID NO: 12310 - protein, 15 aa, Artificial Sequence
  Synthetically generated peptide
  VARIANT (1)..(15): Xaa = Any Amino Acid
ACXEXWCANPACTGC

SEQ ID NO: 12311 - protein, 16 aa, Artificial Sequence
  Synthetically generated peptide
  VARIANT (1)..(16): Xaa = Any Amino Acid
ACXEXXWCANPACTGC

SEQ ID NO: 12312 - protein, 17 aa, Artificial Sequence
  Synthetically generated peptide
  VARIANT (1)..(17): Xaa = Any Amino Acid
ACXEXXXWCANPACTGC

SEQ ID NO: 12313 - protein, 17 aa, Artificial Sequence
  Synthetically generated peptide
  VARIANT (1)..(17): Xaa = Any Amino Acid
ACXEXXWXCANPACTGC

SEQ ID NO: 12314 - protein, 17 aa, Artificial Sequence
  Synthetically generated peptide
  VARIANT (1)..(17): Xaa = Any Amino Acid
ACXEXXWCAXNPACTGC

SEQ ID NO: 12315 - protein, 17 aa, Artificial Sequence
  Synthetically generated peptide
  VARIANT (1)..(17): Xaa = Any Amino Acid
ACXEXXWCANXPACTGC

SEQ ID NO: 12316 - protein, 17 aa, Artificial Sequence
  Synthetically generated peptide
  VARIANT (1)..(17): Xaa = Any Amino Acid
ACXEXXWCANPXACTGC

SEQ ID NO: 12317 - protein, 17 aa, Artificial Sequence
  Synthetically generated peptide
  VARIANT (1)..(17): Xaa = Any Amino Acid
ACXEXXWCANPAXCTGC

SEQ ID NO: 12318 - protein, 17 aa, Artificial Sequence
  Synthetically generated peptide
  VARIANT (1)..(17): Xaa = Any Amino Acid
ACXEXXWCANPACXTGC

SEQ ID NO: 12319 - protein, 17 aa, Artificial Sequence
  Synthetically generated peptide
  VARIANT (1)..(17): Xaa = Any Amino Acid
ACXEXXWCANPACTXGC

SEQ ID NO: 12320 - protein, 17 aa, Artificial Sequence
  Synthetically generated peptide
  VARIANT (1)..(17): Xaa = Any Amino Acid
ACXEXXWCANPACTGXC

SEQ ID NO: 12321 - protein, 16 aa, Artificial Sequence
  Synthetically generated peptide
  VARIANT (1)..(16): Xaa = Any Amino Acid
ACXEXWXCANPACTGC

SEQ ID NO: 12322 - protein, 17 aa, Artificial Sequence
  Synthetically generated peptide
  VARIANT (1)..(17): Xaa = Any Amino Acid
ACXEXWXXCANPACTGC

SEQ ID NO: 12323 - protein, 17 aa, Artificial Sequence
  Synthetically generated peptide
  VARIANT (1)..(17): Xaa = Any Amino Acid
ACXEXWXCAXNPACTGC

SEQ ID NO: 12324 - protein, 17 aa, Artificial Sequence
  Synthetically generated peptide
  VARIANT (1)..(17): Xaa = Any Amino Acid
ACXEXWXCANXPACTGC

SEQ ID NO: 12325 - protein, 17 aa, Artificial Sequence
  Synthetically generated peptide
  VARIANT (1)..(17): Xaa = Any Amino Acid
ACXEXWXCANPXACTGC

SEQ ID NO: 12326 - protein, 17 aa, Artificial Sequence
  Synthetically generated peptide
  VARIANT (1)..(17): Xaa = Any Amino Acid
ACXEXWXCANPAXCTGC

SEQ ID NO: 12327 - protein, 17 aa, Artificial Sequence
  Synthetically generated peptide
  VARIANT (1)..(17): Xaa = Any Amino Acid
ACXEXWXCANPACXTGC

SEQ ID NO: 12328 - protein, 17 aa, Artificial Sequence
  Synthetically generated peptide
  VARIANT (1)..(17): Xaa = Any Amino Acid
ACXEXWXCANPACTXGC

SEQ ID NO: 12329 - protein, 17 aa, Artificial Sequence
  Synthetically generated peptide
  VARIANT (1)..(17): Xaa = Any Amino Acid
ACXEXWXCANPACTGXC

SEQ ID NO: 12330 - protein, 16 aa, Artificial Sequence
  Synthetically generated peptide
  VARIANT (1)..(16): Xaa = Any Amino Acid
ACXEXWCAXNPACTGC

SEQ ID NO: 12331 - protein, 17 aa, Artificial Sequence
  Synthetically generated peptide
  VARIANT (1)..(17): Xaa = Any Amino Acid
ACXEXWCAXXNPACTGC

SEQ ID NO: 12332 - protein, 17 aa, Artificial Sequence
  Synthetically generated peptide
  VARIANT (1)..(17): Xaa = Any Amino Acid
ACXEXWCAXNXPACTGC

SEQ ID NO: 12333 - protein, 17 aa, Artificial Sequence
  Synthetically generated peptide
  VARIANT (1)..(17): Xaa = Any Amino Acid
ACXEXWCAXNPXACTGC

SEQ ID NO: 12334 - protein, 17 aa, Artificial Sequence
  Synthetically generated peptide
  VARIANT (1)..(17): Xaa = Any Amino Acid
ACXEXWCAXNPAXCTGC

SEQ ID NO: 12335 - protein, 17 aa, Artificial Sequence
  Synthetically generated peptide
  VARIANT (1)..(17): Xaa = Any Amino Acid
ACXEXWCAXNPACXTGC

SEQ ID NO: 12336 - protein, 17 aa, Artificial Sequence
  Synthetically generated peptide
  VARIANT (1)..(17): Xaa = Any Amino Acid
ACXEXWCAXNPACTXGC

SEQ ID NO: 12337 - protein, 17 aa, Artificial Sequence
  Synthetically generated peptide
  VARIANT (1)..(17): Xaa = Any Amino Acid
ACXEXWCAXNPACTGXC

SEQ ID NO: 12338 - protein, 16 aa, Artificial Sequence
  Synthetically generated peptide
  VARIANT (1)..(16): Xaa = Any Amino Acid
ACXEXWCANXPACTGC

SEQ ID NO: 12339 - protein, 17 aa, Artificial Sequence
  Synthetically generated peptide
  VARIANT (1)..(17): Xaa = Any Amino Acid
ACXEXWCANXXPACTGC

SEQ ID NO: 12340 - protein, 17 aa, Artificial Sequence
  Synthetically generated peptide
  VARIANT (1)..(17): Xaa = Any Amino Acid
ACXEXWCANXPXACTGC

SEQ ID NO: 12341 - protein, 17 aa, Artificial Sequence
  Synthetically generated peptide
  VARIANT (1)..(17): Xaa = Any Amino Acid
ACXEXWCANXPAXCTGC

SEQ ID NO: 12342 - protein, 17 aa, Artificial Sequence
  Synthetically generated peptide
  VARIANT (1)..(17): Xaa = Any Amino Acid
ACXEXWCANXPACXTGC

SEQ ID NO: 12343 - protein, 17 aa, Artificial Sequence
  Synthetically generated peptide
  VARIANT (1)..(17): Xaa = Any Amino Acid
ACXEXWCANXPACTXGC

SEQ ID NO: 12344 - protein, 17 aa, Artificial Sequence
  Synthetically generated peptide
  VARIANT (1)..(17): Xaa = Any Amino Acid
ACXEXWCANXPACTGXC

SEQ ID NO: 12345 - protein, 16 aa, Artificial Sequence
  Synthetically generated peptide
  VARIANT (1)..(16): Xaa = Any Amino Acid
ACXEXWCANPXACTGC

SEQ ID NO: 12346 - protein, 17 aa, Artificial Sequence
  Synthetically generated peptide
  VARIANT (1)..(17): Xaa = Any Amino Acid
ACXEXWCANPXXACTGC

SEQ ID NO: 12347 - protein, 17 aa, Artificial Sequence
  Synthetically generated peptide
  VARIANT (1)..(17): Xaa = Any Amino Acid
ACXEXWCANPXAXCTGC

SEQ ID NO: 12348 - protein, 17 aa, Artificial Sequence
  Synthetically generated peptide
  VARIANT (1)..(17): Xaa = Any Amino Acid
ACXEXWCANPXACXTGC

SEQ ID NO: 12349 - protein, 17 aa, Artificial Sequence
  Synthetically generated peptide
  VARIANT (1)..(17): Xaa = Any Amino Acid
ACXEXWCANPXACTXGC

SEQ ID NO: 12350 - protein, 17 aa, Artificial Sequence
  Synthetically generated peptide
  VARIANT (1)..(17): Xaa = Any Amino Acid
ACXEXWCANPXACTGXC

SEQ ID NO: 12351 - protein, 16 aa, Artificial Sequence
  Synthetically generated peptide
  VARIANT (1)..(16): Xaa = Any Amino Acid
ACXEXWCANPAXCTGC

SEQ ID NO: 12352 - protein, 17 aa, Artificial Sequence
  Synthetically generated peptide
  VARIANT (1)..(17): Xaa = Any Amino Acid
ACXEXWCANPAXXCTGC

SEQ ID NO: 12353 - protein, 17 aa, Artificial Sequence
  Synthetically generated peptide
  VARIANT (1)..(17): Xaa = Any Amino Acid
ACXEXWCANPAXCXTGC

SEQ ID NO: 12354 - protein, 17 aa, Artificial Sequence
  Synthetically generated peptide
  VARIANT (1)..(17): Xaa = Any Amino Acid
ACXEXWCANPAXCTXGC

SEQ ID NO: 12355 - protein, 17 aa, Artificial Sequence
  Synthetically generated peptide
  VARIANT (1)..(17): Xaa = Any Amino Acid
ACXEXWCANPAXCTGXC

SEQ ID NO: 12356 - protein, 16 aa, Artificial Sequence
  Synthetically generated peptide
  VARIANT (1)..(16): Xaa = Any Amino Acid
ACXEXWCANPACXTGC

SEQ ID NO: 12357 - protein, 17 aa, Artificial Sequence
  Synthetically generated peptide
  VARIANT (1)..(17): Xaa = Any Amino Acid
ACXEXWCANPACXXTGC

SEQ ID NO: 12358 - protein, 17 aa, Artificial Sequence
  Synthetically generated peptide
  VARIANT (1)..(17): Xaa = Any Amino Acid
ACXEXWCANPACXTXGC

SEQ ID NO: 12359 - protein, 17 aa, Artificial Sequence
  Synthetically generated peptide
  VARIANT (1)..(17): Xaa = Any Amino Acid
ACXEXWCANPACXTGXC

SEQ ID NO: 12360 - protein, 16 aa, Artificial Sequence
  Synthetically generated peptide
  VARIANT (1)..(16): Xaa = Any Amino Acid
ACXEXWCANPACTXGC

SEQ ID NO: 12361 - protein, 17 aa, Artificial Sequence
  Synthetically generated peptide
  VARIANT (1)..(17): Xaa = Any Amino Acid
ACXEXWCANPACTXXGC

SEQ ID NO: 12362 - protein, 17 aa, Artificial Sequence
  Synthetically generated peptide
  VARIANT (1)..(17): Xaa = Any Amino Acid
ACXEXWCANPACTXGXC

SEQ ID NO: 12363 - protein, 16 aa, Artificial Sequence
  Synthetically generated peptide
  VARIANT (1)..(16): Xaa = Any Amino Acid
ACXEXWCANPACTGXC

SEQ ID NO: 12364 - protein, 17 aa, Artificial Sequence
  Synthetically generated peptide
  VARIANT (1)..(17): Xaa = Any Amino Acid
ACXEXWCANPACTGXXC

SEQ ID NO: 12365 - protein, 15 aa, Artificial Sequence
  Synthetically generated peptide
  VARIANT (1)..(15): Xaa = Any Amino Acid
ACXEWXCANPACTGC

SEQ ID NO: 12366 - protein, 16 aa, Artificial Sequence
  Synthetically generated peptide
  VARIANT (1)..(16): Xaa = Any Amino Acid
ACXEWXXCANPACTGC

SEQ ID NO: 12367 - protein, 17 aa, Artificial Sequence
  Synthetically generated peptide
  VARIANT (1)..(17): Xaa = Any Amino Acid
ACXEWXXXCANPACTGC

SEQ ID NO: 12368 - protein, 17 aa, Artificial Sequence
  Synthetically generated peptide
  VARIANT (1)..(17): Xaa = Any Amino Acid
ACXEWXXCAXNPACTGC

SEQ ID NO: 12369 - protein, 17 aa, Artificial Sequence
  Synthetically generated peptide
  VARIANT (1)..(17): Xaa = Any Amino Acid
ACXEWXXCANXPACTGC

SEQ ID NO: 12370 - protein, 17 aa, Artificial Sequence
  Synthetically generated peptide
  VARIANT (1)..(17): Xaa = Any Amino Acid
ACXEWXXCANPXACTGC

SEQ ID NO: 12371 - protein, 17 aa, Artificial Sequence
  Synthetically generated peptide
  VARIANT (1)..(17): Xaa = Any Amino Acid
ACXEWXXCANPAXCTGC

SEQ ID NO: 12372 - protein, 17 aa, Artificial Sequence
  Synthetically generated peptide
  VARIANT (1)..(17): Xaa = Any Amino Acid
ACXEWXXCANPACXTGC

SEQ ID NO: 12373 - protein, 17 aa, Artificial Sequence
  Synthetically generated peptide
  VARIANT (1)..(17): Xaa = Any Amino Acid
ACXEWXXCANPACTXGC

SEQ ID NO: 12374 - protein, 17 aa, Artificial Sequence
  Synthetically generated peptide
  VARIANT (1)..(17): Xaa = Any Amino Acid
ACXEWXXCANPACTGXC

SEQ ID NO: 12375 - protein, 16 aa, Artificial Sequence
  Synthetically generated peptide
  VARIANT (1)..(16): Xaa = Any Amino Acid
ACXEWXCAXNPACTGC

SEQ ID NO: 12376 - protein, 17 aa, Artificial Sequence
  Synthetically generated peptide
  VARIANT (1)..(17): Xaa = Any Amino Acid
ACXEWXCAXXNPACTGC

SEQ ID NO: 12377 - protein, 17 aa, Artificial Sequence
  Synthetically generated peptide
  VARIANT (1)..(17): Xaa = Any Amino Acid
ACXEWXCAXNXPACTGC

SEQ ID NO: 12378 - protein, 17 aa, Artificial Sequence
  Synthetically generated peptide
  VARIANT (1)..(17): Xaa = Any Amino Acid
ACXEWXCAXNPXACTGC

SEQ ID NO: 12379 - protein, 17 aa, Artificial Sequence
  Synthetically generated peptide
  VARIANT (1)..(17): Xaa = Any Amino Acid
ACXEWXCAXNPAXCTGC

SEQ ID NO: 12380 - protein, 17 aa, Artificial Sequence
  Synthetically generated peptide
  VARIANT (1)..(17): Xaa = Any Amino Acid
ACXEWXCAXNPACXTGC

SEQ ID NO: 12381 - protein, 17 aa, Artificial Sequence
  Synthetically generated peptide
  VARIANT (1)..(17): Xaa = Any Amino Acid
ACXEWXCAXNPACTXGC

SEQ ID NO: 12382 - protein, 17 aa, Artificial Sequence
  Synthetically generated peptide
  VARIANT (1)..(17): Xaa = Any Amino Acid
ACXEWXCAXNPACTGXC

SEQ ID NO: 12383 - protein, 16 aa, Artificial Sequence
  Synthetically generated peptide
  VARIANT (1)..(16): Xaa = Any Amino Acid
ACXEWXCANXPACTGC

SEQ ID NO: 12384 - protein, 17 aa, Artificial Sequence
  Synthetically generated peptide
  VARIANT (1)..(17): Xaa = Any Amino Acid
ACXEWXCANXXPACTGC

SEQ ID NO: 12385 - protein, 17 aa, Artificial Sequence
  Synthetically generated peptide
  VARIANT (1)..(17): Xaa = Any Amino Acid
ACXEWXCANXPXACTGC

SEQ ID NO: 12386 - protein, 17 aa, Artificial Sequence
  Synthetically generated peptide
  VARIANT (1)..(17): Xaa = Any Amino Acid
ACXEWXCANXPAXCTGC

SEQ ID NO: 12387 - protein, 17 aa, Artificial Sequence
  Synthetically generated peptide
  VARIANT (1)..(17): Xaa = Any Amino Acid
ACXEWXCANXPACXTGC

SEQ ID NO: 12388 - protein, 17 aa, Artificial Sequence
  Synthetically generated peptide
  VARIANT (1)..(17): Xaa = Any Amino Acid
ACXEWXCANXPACTXGC

SEQ ID NO: 12389 - protein, 17 aa, Artificial Sequence
  Synthetically generated peptide
  VARIANT (1)..(17): Xaa = Any Amino Acid
ACXEWXCANXPACTGXC

SEQ ID NO: 12390 - protein, 16 aa, Artificial Sequence
  Synthetically generated peptide
  VARIANT (1)..(16): Xaa = Any Amino Acid
ACXEWXCANPXACTGC

SEQ ID NO: 12391 - protein, 17 aa, Artificial Sequence
  Synthetically generated peptide
  VARIANT (1)..(17): Xaa = Any Amino Acid
ACXEWXCANPXXACTGC

SEQ ID NO: 12392 - protein, 17 aa, Artificial Sequence
  Synthetically generated peptide
  VARIANT (1)..(17): Xaa = Any Amino Acid
ACXEWXCANPXAXCTGC

SEQ ID NO: 12393 - protein, 17 aa, Artificial Sequence
  Synthetically generated peptide
  VARIANT (1)..(17): Xaa = Any Amino Acid
ACXEWXCANPXACXTGC

SEQ ID NO: 12394 - protein, 17 aa, Artificial Sequence
  Synthetically generated peptide
  VARIANT (1)..(17): Xaa = Any Amino Acid
ACXEWXCANPXACTXGC

SEQ ID NO: 12395 - protein, 17 aa, Artificial Sequence
  Synthetically generated peptide
  VARIANT (1)..(17): Xaa = Any Amino Acid
ACXEWXCANPXACTGXC

SEQ ID NO: 12396 - protein, 16 aa, Artificial Sequence
  Synthetically generated peptide
  VARIANT (1)..(16): Xaa = Any Amino Acid
ACXEWXCANPAXCTGC

SEQ ID NO: 12397 - protein, 17 aa, Artificial Sequence
  Synthetically generated peptide
  VARIANT (1)..(17): Xaa = Any Amino Acid
ACXEWXCANPAXXCTGC

SEQ ID NO: 12398 - protein, 17 aa, Artificial Sequence
  Synthetically generated peptide
  VARIANT (1)..(17): Xaa = Any Amino Acid
ACXEWXCANPAXCXTGC

SEQ ID NO: 12399 - protein, 17 aa, Artificial Sequence
  Synthetically generated peptide
  VARIANT (1)..(17): Xaa = Any Amino Acid
ACXEWXCANPAXCTXGC

SEQ ID NO: 12400 - protein, 17 aa, Artificial Sequence
  Synthetically generated peptide
  VARIANT (1)..(17): Xaa = Any Amino Acid
ACXEWXCANPAXCTGXC

SEQ ID NO: 12401 - protein, 16 aa, Artificial Sequence
  Synthetically generated peptide
  VARIANT (1)..(16): Xaa = Any Amino Acid
ACXEWXCANPACXTGC

SEQ ID NO: 12402 - protein, 17 aa, Artificial Sequence
  Synthetically generated peptide
  VARIANT (1)..(17): Xaa = Any Amino Acid
ACXEWXCANPACXXTGC

SEQ ID NO: 12403 - protein, 17 aa, Artificial Sequence
  Synthetically generated peptide
  VARIANT (1)..(17): Xaa = Any Amino Acid
ACXEWXCANPACXTXGC

SEQ ID NO: 12404 - protein, 17 aa, Artificial Sequence
  Synthetically generated peptide
  VARIANT (1)..(17): Xaa = Any Amino Acid
ACXEWXCANPACXTGXC

SEQ ID NO: 12405 - protein, 16 aa, Artificial Sequence
  Synthetically generated peptide
  VARIANT (1)..(16): Xaa = Any Amino Acid
ACXEWXCANPACTXGC

SEQ ID NO: 12406 - protein, 17 aa, Artificial Sequence
  Synthetically generated peptide
  VARIANT (1)..(17): Xaa = Any Amino Acid
ACXEWXCANPACTXXGC

SEQ ID NO: 12407 - protein, 17 aa, Artificial Sequence
  Synthetically generated peptide
  VARIANT (1)..(17): Xaa = Any Amino Acid
ACXEWXCANPACTXGXC

SEQ ID NO: 12408 - protein, 16 aa, Artificial Sequence
  Synthetically generated peptide
  VARIANT (1)..(16): Xaa = Any Amino Acid
ACXEWXCANPACTGXC

SEQ ID NO: 12409 - protein, 17 aa, Artificial Sequence
  Synthetically generated peptide
  VARIANT (1)..(17): Xaa = Any Amino Acid
ACXEWXCANPACTGXXC

SEQ ID NO: 12410 - protein, 15 aa, Artificial Sequence
  Synthetically generated peptide
  VARIANT (1)..(15): Xaa = Any Amino Acid
ACXEWCAXNPACTGC

SEQ ID NO: 12411 - protein, 16 aa, Artificial Sequence
  Synthetically generated peptide
  VARIANT (1)..(16): Xaa = Any Amino Acid
ACXEWCAXXNPACTGC

SEQ ID NO: 12412 - protein, 17 aa, Artificial Sequence
  Synthetically generated peptide
  VARIANT (1)..(17): Xaa = Any Amino Acid
ACXEWCAXXXNPACTGC

SEQ ID NO: 12413 - protein, 17 aa, Artificial Sequence
  Synthetically generated peptide
  VARIANT (1)..(17): Xaa = Any Amino Acid
ACXEWCAXXNXPACTGC

SEQ ID NO: 12414 - protein, 17 aa, Artificial Sequence
  Synthetically generated peptide
  VARIANT (1)..(17): Xaa = Any Amino Acid
ACXEWCAXXNPXACTGC

SEQ ID NO: 12415 - protein, 17 aa, Artificial Sequence
  Synthetically generated peptide
  VARIANT (1)..(17): Xaa = Any Amino Acid
ACXEWCAXXNPAXCTGC

SEQ ID NO: 12416 - protein, 17 aa, Artificial Sequence
  Synthetically generated peptide
  VARIANT (1)..(17): Xaa = Any Amino Acid
ACXEWCAXXNPACXTGC

SEQ ID NO: 12417 - protein, 17 aa, Artificial Sequence
  Synthetically generated peptide
  VARIANT (1)..(17): Xaa = Any Amino Acid
ACXEWCAXXNPACTXGC

SEQ ID NO: 12418 - protein, 17 aa, Artificial Sequence
  Synthetically generated peptide
  VARIANT (1)..(17): Xaa = Any Amino Acid
ACXEWCAXXNPACTGXC

SEQ ID NO: 12419 - protein, 16 aa, Artificial Sequence
  Synthetically generated peptide
  VARIANT (1)..(16): Xaa = Any Amino Acid
ACXEWCAXNXPACTGC

SEQ ID NO: 12420 - protein, 17 aa, Artificial Sequence
  Synthetically generated peptide
  VARIANT (1)..(17): Xaa = Any Amino Acid
ACXEWCAXNXXPACTGC

SEQ ID NO: 12421 - protein, 17 aa, Artificial Sequence
  Synthetically generated peptide
  VARIANT (1)..(17): Xaa = Any Amino Acid
ACXEWCAXNXPXACTGC

SEQ ID NO: 12422 - protein, 17 aa, Artificial Sequence
  Synthetically generated peptide
  VARIANT (1)..(17): Xaa = Any Amino Acid
ACXEWCAXNXPAXCTGC

SEQ ID NO: 12423 - protein, 17 aa, Artificial Sequence
  Synthetically generated peptide
  VARIANT (1)..(17): Xaa = Any Amino Acid
ACXEWCAXNXPACXTGC

SEQ ID NO: 12424 - protein, 17 aa, Artificial Sequence
  Synthetically generated peptide
  VARIANT (1)..(17): Xaa = Any Amino Acid
ACXEWCAXNXPACTXGC

SEQ ID NO: 12425 - protein, 17 aa, Artificial Sequence
  Synthetically generated peptide
  VARIANT (1)..(17): Xaa = Any Amino Acid
ACXEWCAXNXPACTGXC

SEQ ID NO: 12426 - protein, 16 aa, Artificial Sequence
  Synthetically generated peptide
  VARIANT (1)..(16): Xaa = Any Amino Acid
ACXEWCAXNPXACTGC

SEQ ID NO: 12427 - protein, 17 aa, Artificial Sequence
  Synthetically generated peptide
  VARIANT (1)..(17): Xaa = Any Amino Acid
ACXEWCAXNPXXACTGC

SEQ ID NO: 12428 - protein, 17 aa, Artificial Sequence
  Synthetically generated peptide
  VARIANT (1)..(17): Xaa = Any Amino Acid
ACXEWCAXNPXAXCTGC

SEQ ID NO: 12429 - protein, 17 aa, Artificial Sequence
  Synthetically generated peptide
  VARIANT (1)..(17): Xaa = Any Amino Acid
ACXEWCAXNPXACXTGC

SEQ ID NO: 12430 - protein, 17 aa, Artificial Sequence
  Synthetically generated peptide
  VARIANT (1)..(17): Xaa = Any Amino Acid
ACXEWCAXNPXACTXGC

SEQ ID NO: 12431 - protein, 17 aa, Artificial Sequence
  Synthetically generated peptide
  VARIANT (1)..(17): Xaa = Any Amino Acid
ACXEWCAXNPXACTGXC

SEQ ID NO: 12432 - protein, 16 aa, Artificial Sequence
  Synthetically generated peptide
  VARIANT (1)..(16): Xaa = Any Amino Acid
ACXEWCAXNPAXCTGC

SEQ ID NO: 12433 - protein, 17 aa, Artificial Sequence
  Synthetically generated peptide
  VARIANT (1)..(17): Xaa = Any Amino Acid
ACXEWCAXNPAXXCTGC

SEQ ID NO: 12434 - protein, 17 aa, Artificial Sequence
  Synthetically generated peptide
  VARIANT (1)..(17): Xaa = Any Amino Acid
ACXEWCAXNPAXCXTGC

SEQ ID NO: 12435 - protein, 17 aa, Artificial Sequence
  Synthetically generated peptide
  VARIANT (1)..(17): Xaa = Any Amino Acid
ACXEWCAXNPAXCTXGC

SEQ ID NO: 12436 - protein, 17 aa, Artificial Sequence
  Synthetically generated peptide
  VARIANT (1)..(17): Xaa = Any Amino Acid
ACXEWCAXNPAXCTGXC

SEQ ID NO: 12437 - protein, 16 aa, Artificial Sequence
  Synthetically generated peptide
  VARIANT (1)..(16): Xaa = Any Amino Acid
ACXEWCAXNPACXTGC

SEQ ID NO: 12438 - protein, 17 aa, Artificial Sequence
  Synthetically generated peptide
  VARIANT (1)..(17): Xaa = Any Amino Acid
ACXEWCAXNPACXXTGC

SEQ ID NO: 12439 - protein, 17 aa, Artificial Sequence
  Synthetically generated peptide
  VARIANT (1)..(17): Xaa = Any Amino Acid
ACXEWCAXNPACXTXGC

SEQ ID NO: 12440 - protein, 17 aa, Artificial Sequence
  Synthetically generated peptide
  VARIANT (1)..(17): Xaa = Any Amino Acid
ACXEWCAXNPACXTGXC

SEQ ID NO: 12441 - protein, 16 aa, Artificial Sequence
  Synthetically generated peptide
  VARIANT (1)..(16): Xaa = Any Amino Acid
ACXEWCAXNPACTXGC

SEQ ID NO: 12442 - protein, 17 aa, Artificial Sequence
  Synthetically generated peptide
  VARIANT (1)..(17): Xaa = Any Amino Acid
ACXEWCAXNPACTXXGC

SEQ ID NO: 12443 - protein, 17 aa, Artificial Sequence
  Synthetically generated peptide
  VARIANT (1)..(17): Xaa = Any Amino Acid
ACXEWCAXNPACTXGXC

SEQ ID NO: 12444 - protein, 16 aa, Artificial Sequence
  Synthetically generated peptide
  VARIANT (1)..(16): Xaa = Any Amino Acid
ACXEWCAXNPACTGXC

SEQ ID NO: 12445 - protein, 17 aa, Artificial Sequence
  Synthetically generated peptide
  VARIANT (1)..(17): Xaa = Any Amino Acid
ACXEWCAXNPACTGXXC

SEQ ID NO: 12446 - protein, 15 aa, Artificial Sequence
  Synthetically generated peptide
  VARIANT (1)..(15): Xaa = Any Amino Acid
ACXEWCANXPACTGC

SEQ ID NO: 12447 - protein, 16 aa, Artificial Sequence
  Synthetically generated peptide
  VARIANT (1)..(16): Xaa = Any Amino Acid
ACXEWCANXXPACTGC

SEQ ID NO: 12448 - protein, 17 aa, Artificial Sequence
  Synthetically generated peptide
  VARIANT (1)..(17): Xaa = Any Amino Acid
ACXEWCANXXXPACTGC

SEQ ID NO: 12449 - protein, 17 aa, Artificial Sequence
  Synthetically generated peptide
  VARIANT (1)..(17): Xaa = Any Amino Acid
ACXEWCANXXPXACTGC

SEQ ID NO: 12450 - protein, 17 aa, Artificial Sequence
  Synthetically generated peptide
  VARIANT (1)..(17): Xaa = Any Amino Acid
ACXEWCANXXPAXCTGC

SEQ ID NO: 12451 - protein, 17 aa, Artificial Sequence
  Synthetically generated peptide
  VARIANT (1)..(17): Xaa = Any Amino Acid
ACXEWCANXXPACXTGC

SEQ ID NO: 12452 - protein, 17 aa, Artificial Sequence
  Synthetically generated peptide
  VARIANT (1)..(17): Xaa = Any Amino Acid
ACXEWCANXXPACTXGC

SEQ ID NO: 12453 - protein, 17 aa, Artificial Sequence
  Synthetically generated peptide
  VARIANT (1)..(17): Xaa = Any Amino Acid
ACXEWCANXXPACTGXC

SEQ ID NO: 12454 - protein, 16 aa, Artificial Sequence
  Synthetically generated peptide
  VARIANT (1)..(16): Xaa = Any Amino Acid
ACXEWCANXPXACTGC

SEQ ID NO: 12455 - protein, 17 aa, Artificial Sequence
  Synthetically generated peptide
  VARIANT (1)..(17): Xaa = Any Amino Acid
ACXEWCANXPXXACTGC

SEQ ID NO: 12456 - protein, 17 aa, Artificial Sequence
  Synthetically generated peptide
  VARIANT (1)..(17): Xaa = Any Amino Acid
ACXEWCANXPXAXCTGC

SEQ ID NO: 12457 - protein, 17 aa, Artificial Sequence
  Synthetically generated peptide
  VARIANT (1)..(17): Xaa = Any Amino Acid
ACXEWCANXPXACXTGC

SEQ ID NO: 12458 - protein, 17 aa, Artificial Sequence
  Synthetically generated peptide
  VARIANT (1)..(17): Xaa = Any Amino Acid
ACXEWCANXPXACTXGC

SEQ ID NO: 12459 - protein, 17 aa, Artificial Sequence
  Synthetically generated peptide
  VARIANT (1)..(17): Xaa = Any Amino Acid
ACXEWCANXPXACTGXC

SEQ ID NO: 12460 - protein, 16 aa, Artificial Sequence
  Synthetically generated peptide
  VARIANT (1)..(16): Xaa = Any Amino Acid
ACXEWCANXPAXCTGC

SEQ ID NO: 12461 - protein, 17 aa, Artificial Sequence
  Synthetically generated peptide
  VARIANT (1)..(17): Xaa = Any Amino Acid
ACXEWCANXPAXXCTGC

SEQ ID NO: 12462 - protein, 17 aa, Artificial Sequence
  Synthetically generated peptide
  VARIANT (1)..(17): Xaa = Any Amino Acid
ACXEWCANXPAXCXTGC

SEQ ID NO: 12463 - protein, 17 aa, Artificial Sequence
  Synthetically generated peptide
  VARIANT (1)..(17): Xaa = Any Amino Acid
ACXEWCANXPAXCTXGC

SEQ ID NO: 12464 - protein, 17 aa, Artificial Sequence
  Synthetically generated peptide
  VARIANT (1)..(17): Xaa = Any Amino Acid
ACXEWCANXPAXCTGXC

SEQ ID NO: 12465 - protein, 16 aa, Artificial Sequence
  Synthetically generated peptide
  VARIANT (1)..(16): Xaa = Any Amino Acid
ACXEWCANXPACXTGC

SEQ ID NO: 12466 - protein, 17 aa, Artificial Sequence
  Synthetically generated peptide
  VARIANT (1)..(17): Xaa = Any Amino Acid
ACXEWCANXPACXXTGC

SEQ ID NO: 12467 - protein, 17 aa, Artificial Sequence
  Synthetically generated peptide
  VARIANT (1)..(17): Xaa = Any Amino Acid
ACXEWCANXPACXTXGC

SEQ ID NO: 12468 - protein, 17 aa, Artificial Sequence
  Synthetically generated peptide
  VARIANT (1)..(17): Xaa = Any Amino Acid
ACXEWCANXPACXTGXC

SEQ ID NO: 12469 - protein, 16 aa, Artificial Sequence
  Synthetically generated peptide
  VARIANT (1)..(16): Xaa = Any Amino Acid
ACXEWCANXPACTXGC

SEQ ID NO: 12470 - protein, 17 aa, Artificial Sequence
  Synthetically generated peptide
  VARIANT (1)..(17): Xaa = Any Amino Acid
ACXEWCANXPACTXXGC

SEQ ID NO: 12471 - protein, 17 aa, Artificial Sequence
  Synthetically generated peptide
  VARIANT (1)..(17): Xaa = Any Amino Acid
ACXEWCANXPACTXGXC

SEQ ID NO: 12472 - protein, 16 aa, Artificial Sequence
  Synthetically generated peptide
  VARIANT (1)..(16): Xaa = Any Amino Acid
ACXEWCANXPACTGXC

SEQ ID NO: 12473 - protein, 17 aa, Artificial Sequence
  Synthetically generated peptide
  VARIANT (1)..(17): Xaa = Any Amino Acid
ACXEWCANXPACTGXXC

SEQ ID NO: 12474 - protein, 15 aa, Artificial Sequence
  Synthetically generated peptide
  VARIANT (1)..(15): Xaa = Any Amino Acid
ACXEWCANPXACTGC

SEQ ID NO: 12475 - protein, 16 aa, Artificial Sequence
  Synthetically generated peptide
  VARIANT (1)..(16): Xaa = Any Amino Acid
ACXEWCANPXXACTGC

SEQ ID NO: 12476 - protein, 17 aa, Artificial Sequence
  Synthetically generated peptide
  VARIANT (1)..(17): Xaa = Any Amino Acid
ACXEWCANPXXXACTGC

SEQ ID NO: 12477 - protein, 17 aa, Artificial Sequence
  Synthetically generated peptide
  VARIANT (1)..(17): Xaa = Any Amino Acid
ACXEWCANPXXAXCTGC

SEQ ID NO: 12478 - protein, 17 aa, Artificial Sequence
  Synthetically generated peptide
  VARIANT (1)..(17): Xaa = Any Amino Acid
ACXEWCANPXXACXTGC

SEQ ID NO: 12479 - protein, 17 aa, Artificial Sequence
  Synthetically generated peptide
  VARIANT (1)..(17): Xaa = Any Amino Acid
ACXEWCANPXXACTXGC

SEQ ID NO: 12480 - protein, 17 aa, Artificial Sequence
  Synthetically generated peptide
  VARIANT (1)..(17): Xaa = Any Amino Acid
ACXEWCANPXXACTGXC

SEQ ID NO: 12481 - protein, 16 aa, Artificial Sequence
  Synthetically generated peptide
  VARIANT (1)..(16): Xaa = Any Amino Acid
ACXEWCANPXAXCTGC

SEQ ID NO: 12482 - protein, 17 aa, Artificial Sequence
  Synthetically generated peptide
  VARIANT (1)..(17): Xaa = Any Amino Acid
ACXEWCANPXAXXCTGC

SEQ ID NO: 12483 - protein, 17 aa, Artificial Sequence
  Synthetically generated peptide
  VARIANT (1)..(17): Xaa = Any Amino Acid
ACXEWCANPXAXCXTGC

SEQ ID NO: 12484 - protein, 17 aa, Artificial Sequence
  Synthetically generated peptide
  VARIANT (1)..(17): Xaa = Any Amino Acid
ACXEWCANPXAXCTXGC

SEQ ID NO: 12485 - protein, 17 aa, Artificial Sequence
  Synthetically generated peptide
  VARIANT (1)..(17): Xaa = Any Amino Acid
ACXEWCANPXAXCTGXC

SEQ ID NO: 12486 - protein, 16 aa, Artificial Sequence
  Synthetically generated peptide
  VARIANT (1)..(16): Xaa = Any Amino Acid
ACXEWCANPXACXTGC

SEQ ID NO: 12487 - protein, 17 aa, Artificial Sequence
  Synthetically generated peptide
  VARIANT (1)..(17): Xaa = Any Amino Acid
ACXEWCANPXACXXTGC

SEQ ID NO: 12488 - protein, 17 aa, Artificial Sequence
  Synthetically generated peptide
  VARIANT (1)..(17): Xaa = Any Amino Acid
ACXEWCANPXACXTXGC

SEQ ID NO: 12489 - protein, 17 aa, Artificial Sequence
  Synthetically generated peptide
  VARIANT (1)..(17): Xaa = Any Amino Acid
ACXEWCANPXACXTGXC

SEQ ID NO: 12490 - protein, 16 aa, Artificial Sequence
  Synthetically generated peptide
  VARIANT (1)..(16): Xaa = Any Amino Acid
ACXEWCANPXACTXGC

SEQ ID NO: 12491 - protein, 17 aa, Artificial Sequence
  Synthetically generated peptide
  VARIANT (1)..(17): Xaa = Any Amino Acid
ACXEWCANPXACTXXGC

SEQ ID NO: 12492 - protein, 17 aa, Artificial Sequence
  Synthetically generated peptide
  VARIANT (1)..(17): Xaa = Any Amino Acid
ACXEWCANPXACTXGXC

SEQ ID NO: 12493 - protein, 16 aa, Artificial Sequence
  Synthetically generated peptide
  VARIANT (1)..(16): Xaa = Any Amino Acid
ACXEWCANPXACTGXC

SEQ ID NO: 12494 - protein, 17 aa, Artificial Sequence
  Synthetically generated peptide
  VARIANT (1)..(17): Xaa = Any Amino Acid
ACXEWCANPXACTGXXC

SEQ ID NO: 12495 - protein, 15 aa, Artificial Sequence
  Synthetically generated peptide
  VARIANT (1)..(15): Xaa = Any Amino Acid
ACXEWCANPAXCTGC

SEQ ID NO: 12496 - protein, 16 aa, Artificial Sequence
  Synthetically generated peptide
  VARIANT (1)..(16): Xaa = Any Amino Acid
ACXEWCANPAXXCTGC

SEQ ID NO: 12497 - protein, 17 aa, Artificial Sequence
  Synthetically generated peptide
  VARIANT (1)..(17): Xaa = Any Amino Acid
ACXEWCANPAXXXCTGC

SEQ ID NO: 12498 - protein, 17 aa, Artificial Sequence
  Synthetically generated peptide
  VARIANT (1)..(17): Xaa = Any Amino Acid
ACXEWCANPAXXCXTGC

SEQ ID NO: 12499 - protein, 17 aa, Artificial Sequence
  Synthetically generated peptide
  VARIANT (1)..(17): Xaa = Any Amino Acid
ACXEWCANPAXXCTXGC

SEQ ID NO: 12500 - protein, 17 aa, Artificial Sequence
  Synthetically generated peptide
  VARIANT (1)..(17): Xaa = Any Amino Acid
ACXEWCANPAXXCTGXC

SEQ ID NO: 12501 - protein, 16 aa, Artificial Sequence
  Synthetically generated peptide
  VARIANT (1)..(16): Xaa = Any Amino Acid
ACXEWCANPAXCXTGC

SEQ ID NO: 12502 - protein, 17 aa, Artificial Sequence
  Synthetically generated peptide
  VARIANT (1)..(17): Xaa = Any Amino Acid
ACXEWCANPAXCXXTGC

SEQ ID NO: 12503 - protein, 17 aa, Artificial Sequence
  Synthetically generated peptide
  VARIANT (1)..(17): Xaa = Any Amino Acid
ACXEWCANPAXCXTXGC

SEQ ID NO: 12504 - protein, 17 aa, Artificial Sequence
  Synthetically generated peptide
  VARIANT (1)..(17): Xaa = Any Amino Acid
ACXEWCANPAXCXTGXC

SEQ ID NO: 12505 - protein, 16 aa, Artificial Sequence
  Synthetically generated peptide
  VARIANT (1)..(16): Xaa = Any Amino Acid
ACXEWCANPAXCTXGC

SEQ ID NO: 12506 - protein, 17 aa, Artificial Sequence
  Synthetically generated peptide
  VARIANT (1)..(17): Xaa = Any Amino Acid
ACXEWCANPAXCTXXGC

SEQ ID NO: 12507 - protein, 17 aa, Artificial Sequence
  Synthetically generated peptide
  VARIANT (1)..(17): Xaa = Any Amino Acid
ACXEWCANPAXCTXGXC

SEQ ID NO: 12508 - protein, 16 aa, Artificial Sequence
  Synthetically generated peptide
  VARIANT (1)..(16): Xaa = Any Amino Acid
ACXEWCANPAXCTGXC

SEQ ID NO: 12509 - protein, 17 aa, Artificial Sequence
  Synthetically generated peptide
  VARIANT (1)..(17): Xaa = Any Amino Acid
ACXEWCANPAXCTGXXC

SEQ ID NO: 12510 - protein, 15 aa, Artificial Sequence
  Synthetically generated peptide
  VARIANT (1)..(15): Xaa = Any Amino Acid
ACXEWCANPACXTGC

SEQ ID NO: 12511 - protein, 16 aa, Artificial Sequence
  Synthetically generated peptide
  VARIANT (1)..(16): Xaa = Any Amino Acid
ACXEWCANPACXXTGC

SEQ ID NO: 12512 - protein, 17 aa, Artificial Sequence
  Synthetically generated peptide
  VARIANT (1)..(17): Xaa = Any Amino Acid
ACXEWCANPACXXXTGC

SEQ ID NO: 12513 - protein, 17 aa, Artificial Sequence
  Synthetically generated peptide
  VARIANT (1)..(17): Xaa = Any Amino Acid
ACXEWCANPACXXTXGC

SEQ ID NO: 12514 - protein, 17 aa, Artificial Sequence
  Synthetically generated peptide
  VARIANT (1)..(17): Xaa = Any Amino Acid
ACXEWCANPACXXTGXC

SEQ ID NO: 12515 - protein, 16 aa, Artificial Sequence
  Synthetically generated peptide
  VARIANT (1)..(16): Xaa = Any Amino Acid
ACXEWCANPACXTXGC

SEQ ID NO: 12516 - protein, 17 aa, Artificial Sequence
  Synthetically generated peptide
  VARIANT (1)..(17): Xaa = Any Amino Acid
ACXEWCANPACXTXXGC

SEQ ID NO: 12517 - protein, 17 aa, Artificial Sequence
  Synthetically generated peptide
  VARIANT (1)..(17): Xaa = Any Amino Acid
ACXEWCANPACXTXGXC

SEQ ID NO: 12518 - protein, 16 aa, Artificial Sequence
  Synthetically generated peptide
  VARIANT (1)..(16): Xaa = Any Amino Acid
ACXEWCANPACXTGXC

SEQ ID NO: 12519 - protein, 17 aa, Artificial Sequence
  Synthetically generated peptide
  VARIANT (1)..(17): Xaa = Any Amino Acid
ACXEWCANPACXTGXXC

SEQ ID NO: 12520 - protein, 15 aa, Artificial Sequence
  Synthetically generated peptide
  VARIANT (1)..(15): Xaa = Any Amino Acid
ACXEWCANPACTXGC

SEQ ID NO: 12521 - protein, 16 aa, Artificial Sequence
  Synthetically generated peptide
  VARIANT (1)..(16): Xaa = Any Amino Acid
ACXEWCANPACTXXGC

SEQ ID NO: 12522 - protein, 17 aa, Artificial Sequence
  Synthetically generated peptide
  VARIANT (1)..(17): Xaa = Any Amino Acid
ACXEWCANPACTXXXGC

SEQ ID NO: 12523 - protein, 17 aa, Artificial Sequence
  Synthetically generated peptide
  VARIANT (1)..(17): Xaa = Any Amino Acid
ACXEWCANPACTXXGXC

SEQ ID NO: 12524 - protein, 16 aa, Artificial Sequence
  Synthetically generated peptide
  VARIANT (1)..(16): Xaa = Any Amino Acid
ACXEWCANPACTXGXC

SEQ ID NO: 12525 - protein, 17 aa, Artificial Sequence
  Synthetically generated peptide
  VARIANT (1)..(17): Xaa = Any Amino Acid
ACXEWCANPACTXGXXC

SEQ ID NO: 12526 - protein, 15 aa, Artificial Sequence
  Synthetically generated peptide
  VARIANT (1)..(15): Xaa = Any Amino Acid
ACXEWCANPACTGXC

SEQ ID NO: 12527 - protein, 16 aa, Artificial Sequence
  Synthetically generated peptide
  VARIANT (1)..(16): Xaa = Any Amino Acid
ACXEWCANPACTGXXC

SEQ ID NO: 12528 - protein, 17 aa, Artificial Sequence
  Synthetically generated peptide
  VARIANT (1)..(17): Xaa = Any Amino Acid
ACXEWCANPACTGXXXC

SEQ ID NO: 12529 - protein, 14 aa, Artificial Sequence
  Synthetically generated peptide
  VARIANT (1)..(14): Xaa = Any Amino Acid
ACEXWCANPACTGC

SEQ ID NO: 12530 - protein, 15 aa, Artificial Sequence
  Synthetically generated peptide
  VARIANT (1)..(15): Xaa = Any Amino Acid
ACEXXWCANPACTGC

SEQ ID NO: 12531 - protein, 16 aa, Artificial Sequence
  Synthetically generated peptide
  VARIANT (1)..(16): Xaa = Any Amino Acid
ACEXXXWCANPACTGC

SEQ ID NO: 12532 - protein, 17 aa, Artificial Sequence
  Synthetically generated peptide
  VARIANT (1)..(17): Xaa = Any Amino Acid
ACEXXXXWCANPACTGC

SEQ ID NO: 12533 - protein, 17 aa, Artificial Sequence
  Synthetically generated peptide
  VARIANT (1)..(17): Xaa = Any Amino Acid
ACEXXXWXCANPACTGC

SEQ ID NO: 12534 - protein, 17 aa, Artificial Sequence
  Synthetically generated peptide
  VARIANT (1)..(17): Xaa = Any Amino Acid
ACEXXXWCAXNPACTGC

SEQ ID NO: 12535 - protein, 17 aa, Artificial Sequence
  Synthetically generated peptide
  VARIANT (1)..(17): Xaa = Any Amino Acid
ACEXXXWCANXPACTGC

SEQ ID NO: 12536 - protein, 17 aa, Artificial Sequence
  Synthetically generated peptide
  VARIANT (1)..(17): Xaa = Any Amino Acid
ACEXXXWCANPXACTGC

SEQ ID NO: 12537 - protein, 17 aa, Artificial Sequence
  Synthetically generated peptide
  VARIANT (1)..(17): Xaa = Any Amino Acid
ACEXXXWCANPAXCTGC

SEQ ID NO: 12538 - protein, 17 aa, Artificial Sequence
  Synthetically generated peptide
  VARIANT (1)..(17): Xaa = Any Amino Acid
ACEXXXWCANPACXTGC

SEQ ID NO: 12539 - protein, 17 aa, Artificial Sequence
  Synthetically generated peptide
  VARIANT (1)..(17): Xaa = Any Amino Acid
ACEXXXWCANPACTXGC

SEQ ID NO: 12540 - protein, 17 aa, Artificial Sequence
  Synthetically generated peptide
  VARIANT (1)..(17): Xaa = Any Amino Acid
ACEXXXWCANPACTGXC

SEQ ID NO: 12541 - protein, 16 aa, Artificial Sequence
  Synthetically generated peptide
  VARIANT (1)..(16): Xaa = Any Amino Acid
ACEXXWXCANPACTGC

SEQ ID NO: 12542 - protein, 17 aa, Artificial Sequence
  Synthetically generated peptide
  VARIANT (1)..(17): Xaa = Any Amino Acid
ACEXXWXXCANPACTGC

SEQ ID NO: 12543 - protein, 17 aa, Artificial Sequence
  Synthetically generated peptide
  VARIANT (1)..(17): Xaa = Any Amino Acid
ACEXXWXCAXNPACTGC

SEQ ID NO: 12544 - protein, 17 aa, Artificial Sequence
  Synthetically generated peptide
  VARIANT (1)..(17): Xaa = Any Amino Acid
ACEXXWXCANXPACTGC

SEQ ID NO: 12545 - protein, 17 aa, Artificial Sequence
  Synthetically generated peptide
  VARIANT (1)..(17): Xaa = Any Amino Acid
ACEXXWXCANPXACTGC

SEQ ID NO: 12546 - protein, 17 aa, Artificial Sequence
  Synthetically generated peptide
  VARIANT (1)..(17): Xaa = Any Amino Acid
ACEXXWXCANPAXCTGC

SEQ ID NO: 12547 - protein, 17 aa, Artificial Sequence
  Synthetically generated peptide
  VARIANT (1)..(17): Xaa = Any Amino Acid
ACEXXWXCANPACXTGC

SEQ ID NO: 12548 - protein, 17 aa, Artificial Sequence
  Synthetically generated peptide
  VARIANT (1)..(17): Xaa = Any Amino Acid
ACEXXWXCANPACTXGC

SEQ ID NO: 12549 - protein, 17 aa, Artificial Sequence
  Synthetically generated peptide
  VARIANT (1)..(17): Xaa = Any Amino Acid
ACEXXWXCANPACTGXC

SEQ ID NO: 12550 - protein, 16 aa, Artificial Sequence
  Synthetically generated peptide
  VARIANT (1)..(16): Xaa = Any Amino Acid
ACEXXWCAXNPACTGC

SEQ ID NO: 12551 - protein, 17 aa, Artificial Sequence
  Synthetically generated peptide
  VARIANT (1)..(17): Xaa = Any Amino Acid
ACEXXWCAXXNPACTGC

SEQ ID NO: 12552 - protein, 17 aa, Artificial Sequence
  Synthetically generated peptide
  VARIANT (1)..(17): Xaa = Any Amino Acid
ACEXXWCAXNXPACTGC

SEQ ID NO: 12553 - protein, 17 aa, Artificial Sequence
  Synthetically generated peptide
  VARIANT (1)..(17): Xaa = Any Amino Acid
ACEXXWCAXNPXACTGC

SEQ ID NO: 12554 - protein, 17 aa, Artificial Sequence
  Synthetically generated peptide
  VARIANT (1)..(17): Xaa = Any Amino Acid
ACEXXWCAXNPAXCTGC

SEQ ID NO: 12555 - protein, 17 aa, Artificial Sequence
  Synthetically generated peptide
  VARIANT (1)..(17): Xaa = Any Amino Acid
ACEXXWCAXNPACXTGC

SEQ ID NO: 12556 - protein, 17 aa, Artificial Sequence
  Synthetically generated peptide
  VARIANT (1)..(17): Xaa = Any Amino Acid
ACEXXWCAXNPACTXGC

SEQ ID NO: 12557 - protein, 17 aa, Artificial Sequence
  Synthetically generated peptide
  VARIANT (1)..(17): Xaa = Any Amino Acid
ACEXXWCAXNPACTGXC

SEQ ID NO: 12558 - protein, 16 aa, Artificial Sequence
  Synthetically generated peptide
  VARIANT (1)..(16): Xaa = Any Amino Acid
ACEXXWCANXPACTGC

SEQ ID NO: 12559 - protein, 17 aa, Artificial Sequence
  Synthetically generated peptide
  VARIANT (1)..(17): Xaa = Any Amino Acid
ACEXXWCANXXPACTGC

SEQ ID NO: 12560 - protein, 17 aa, Artificial Sequence
  Synthetically generated peptide
  VARIANT (1)..(17): Xaa = Any Amino Acid
ACEXXWCANXPXACTGC

SEQ ID NO: 12561 - protein, 17 aa, Artificial Sequence
  Synthetically generated peptide
  VARIANT (1)..(17): Xaa = Any Amino Acid
ACEXXWCANXPAXCTGC

SEQ ID NO: 12562 - protein, 17 aa, Artificial Sequence
  Synthetically generated peptide
  VARIANT (1)..(17): Xaa = Any Amino Acid
ACEXXWCANXPACXTGC

SEQ ID NO: 12563 - protein, 17 aa, Artificial Sequence
  Synthetically generated peptide
  VARIANT (1)..(17): Xaa = Any Amino Acid
ACEXXWCANXPACTXGC

SEQ ID NO: 12564 - protein, 17 aa, Artificial Sequence
  Synthetically generated peptide
  VARIANT (1)..(17): Xaa = Any Amino Acid
ACEXXWCANXPACTGXC

SEQ ID NO: 12565 - protein, 16 aa, Artificial Sequence
  Synthetically generated peptide
  VARIANT (1)..(16): Xaa = Any Amino Acid
ACEXXWCANPXACTGC

SEQ ID NO: 12566 - protein, 17 aa, Artificial Sequence
  Synthetically generated peptide
  VARIANT (1)..(17): Xaa = Any Amino Acid
ACEXXWCANPXXACTGC

SEQ ID NO: 12567 - protein, 17 aa, Artificial Sequence
  Synthetically generated peptide
  VARIANT (1)..(17): Xaa = Any Amino Acid
ACEXXWCANPXAXCTGC

SEQ ID NO: 12568 - protein, 17 aa, Artificial Sequence
  Synthetically generated peptide
  VARIANT (1)..(17): Xaa = Any Amino Acid
ACEXXWCANPXACXTGC

SEQ ID NO: 12569 - protein, 17 aa, Artificial Sequence
  Synthetically generated peptide
  VARIANT (1)..(17): Xaa = Any Amino Acid
ACEXXWCANPXACTXGC

SEQ ID NO: 12570 - protein, 17 aa, Artificial Sequence
  Synthetically generated peptide
  VARIANT (1)..(17): Xaa = Any Amino Acid
ACEXXWCANPXACTGXC

SEQ ID NO: 12571 - protein, 16 aa, Artificial Sequence
  Synthetically generated peptide
  VARIANT (1)..(16): Xaa = Any Amino Acid
ACEXXWCANPAXCTGC

SEQ ID NO: 12572 - protein, 17 aa, Artificial Sequence
  Synthetically generated peptide
  VARIANT (1)..(17): Xaa = Any Amino Acid
ACEXXWCANPAXXCTGC

SEQ ID NO: 12573 - protein, 17 aa, Artificial Sequence
  Synthetically generated peptide
  VARIANT (1)..(17): Xaa = Any Amino Acid
ACEXXWCANPAXCXTGC

SEQ ID NO: 12574 - protein, 17 aa, Artificial Sequence
  Synthetically generated peptide
  VARIANT (1)..(17): Xaa = Any Amino Acid
ACEXXWCANPAXCTXGC

SEQ ID NO: 12575 - protein, 17 aa, Artificial Sequence
  Synthetically generated peptide
  VARIANT (1)..(17): Xaa = Any Amino Acid
ACEXXWCANPAXCTGXC

SEQ ID NO: 12576 - protein, 16 aa, Artificial Sequence
  Synthetically generated peptide
  VARIANT (1)..(16): Xaa = Any Amino Acid
ACEXXWCANPACXTGC

SEQ ID NO: 12577 - protein, 17 aa, Artificial Sequence
  Synthetically generated peptide
  VARIANT (1)..(17): Xaa = Any Amino Acid
ACEXXWCANPACXXTGC

SEQ ID NO: 12578 - protein, 17 aa, Artificial Sequence
  Synthetically generated peptide
  VARIANT (1)..(17): Xaa = Any Amino Acid
ACEXXWCANPACXTXGC

SEQ ID NO: 12579 - protein, 17 aa, Artificial Sequence
  Synthetically generated peptide
  VARIANT (1)..(17): Xaa = Any Amino Acid
ACEXXWCANPACXTGXC

SEQ ID NO: 12580 - protein, 16 aa, Artificial Sequence
  Synthetically generated peptide
  VARIANT (1)..(16): Xaa = Any Amino Acid
ACEXXWCANPACTXGC

SEQ ID NO: 12581 - protein, 17 aa, Artificial Sequence
  Synthetically generated peptide
  VARIANT (1)..(17): Xaa = Any Amino Acid
ACEXXWCANPACTXXGC

SEQ ID NO: 12582 - protein, 17 aa, Artificial Sequence
  Synthetically generated peptide
  VARIANT (1)..(17): Xaa = Any Amino Acid
ACEXXWCANPACTXGXC

SEQ ID NO: 12583 - protein, 16 aa, Artificial Sequence
  Synthetically generated peptide
  VARIANT (1)..(16): Xaa = Any Amino Acid
ACEXXWCANPACTGXC

SEQ ID NO: 12584 - protein, 17 aa, Artificial Sequence
  Synthetically generated peptide
  VARIANT (1)..(17): Xaa = Any Amino Acid
ACEXXWCANPACTGXXC

SEQ ID NO: 12585 - protein, 15 aa, Artificial Sequence
  Synthetically generated peptide
  VARIANT (1)..(15): Xaa = Any Amino Acid
ACEXWXCANPACTGC

SEQ ID NO: 12586 - protein, 16 aa, Artificial Sequence
  Synthetically generated peptide
  VARIANT (1)..(16): Xaa = Any Amino Acid
ACEXWXXCANPACTGC

SEQ ID NO: 12587 - protein, 17 aa, Artificial Sequence
  Synthetically generated peptide
  VARIANT (1)..(17): Xaa = Any Amino Acid
ACEXWXXXCANPACTGC

SEQ ID NO: 12588 - protein, 17 aa, Artificial Sequence
  Synthetically generated peptide
  VARIANT (1)..(17): Xaa = Any Amino Acid
ACEXWXXCAXNPACTGC

SEQ ID NO: 12589 - protein, 17 aa, Artificial Sequence
  Synthetically generated peptide
  VARIANT (1)..(17): Xaa = Any Amino Acid
ACEXWXXCANXPACTGC

SEQ ID NO: 12590 - protein, 17 aa, Artificial Sequence
  Synthetically generated peptide
  VARIANT (1)..(17): Xaa = Any Amino Acid
ACEXWXXCANPXACTGC

SEQ ID NO: 12591 - protein, 17 aa, Artificial Sequence
  Synthetically generated peptide
  VARIANT (1)..(17): Xaa = Any Amino Acid
ACEXWXXCANPAXCTGC

SEQ ID NO: 12592 - protein, 17 aa, Artificial Sequence
  Synthetically generated peptide
  VARIANT (1)..(17): Xaa = Any Amino Acid
ACEXWXXCANPACXTGC

SEQ ID NO: 12593 - protein, 17 aa, Artificial Sequence
  Synthetically generated peptide
  VARIANT (1)..(17): Xaa = Any Amino Acid
ACEXWXXCANPACTXGC

SEQ ID NO: 12594 - protein, 17 aa, Artificial Sequence
  Synthetically generated peptide
  VARIANT (1)..(17): Xaa = Any Amino Acid
ACEXWXXCANPACTGXC

SEQ ID NO: 12595 - protein, 16 aa, Artificial Sequence
  Synthetically generated peptide
  VARIANT (1)..(16): Xaa = Any Amino Acid
ACEXWXCAXNPACTGC

SEQ ID NO: 12596 - protein, 17 aa, Artificial Sequence
  Synthetically generated peptide
  VARIANT (1)..(17): Xaa = Any Amino Acid
ACEXWXCAXXNPACTGC

SEQ ID NO: 12597 - protein, 17 aa, Artificial Sequence
  Synthetically generated peptide
  VARIANT (1)..(17): Xaa = Any Amino Acid
ACEXWXCAXNXPACTGC

SEQ ID NO: 12598 - protein, 17 aa, Artificial Sequence
  Synthetically generated peptide
  VARIANT (1)..(17): Xaa = Any Amino Acid
ACEXWXCAXNPXACTGC

SEQ ID NO: 12599 - protein, 17 aa, Artificial Sequence
  Synthetically generated peptide
  VARIANT (1)..(17): Xaa = Any Amino Acid
ACEXWXCAXNPAXCTGC

SEQ ID NO: 12600 - protein, 17 aa, Artificial Sequence
  Synthetically generated peptide
  VARIANT (1)..(17): Xaa = Any Amino Acid
ACEXWXCAXNPACXTGC

SEQ ID NO: 12601 - protein, 17 aa, Artificial Sequence
  Synthetically generated peptide
  VARIANT (1)..(17): Xaa = Any Amino Acid
ACEXWXCAXNPACTXGC

SEQ ID NO: 12602 - protein, 17 aa, Artificial Sequence
  Synthetically generated peptide
  VARIANT (1)..(17): Xaa = Any Amino Acid
ACEXWXCAXNPACTGXC

SEQ ID NO: 12603 - protein, 16 aa, Artificial Sequence
  Synthetically generated peptide
  VARIANT (1)..(16): Xaa = Any Amino Acid
ACEXWXCANXPACTGC

SEQ ID NO: 12604 - protein, 17 aa, Artificial Sequence
  Synthetically generated peptide
  VARIANT (1)..(17): Xaa = Any Amino Acid
ACEXWXCANXXPACTGC

SEQ ID NO: 12605 - protein, 17 aa, Artificial Sequence
  Synthetically generated peptide
  VARIANT (1)..(17): Xaa = Any Amino Acid
ACEXWXCANXPXACTGC

SEQ ID NO: 12606 - protein, 17 aa, Artificial Sequence
  Synthetically generated peptide
  VARIANT (1)..(17): Xaa = Any Amino Acid
ACEXWXCANXPAXCTGC

SEQ ID NO: 12607 - protein, 17 aa, Artificial Sequence
  Synthetically generated peptide
  VARIANT (1)..(17): Xaa = Any Amino Acid
ACEXWXCANXPACXTGC

SEQ ID NO: 12608 - protein, 17 aa, Artificial Sequence
  Synthetically generated peptide
  VARIANT (1)..(17): Xaa = Any Amino Acid
ACEXWXCANXPACTXGC

SEQ ID NO: 12609 - protein, 17 aa, Artificial Sequence
  Synthetically generated peptide
  VARIANT (1)..(17): Xaa = Any Amino Acid
ACEXWXCANXPACTGXC

SEQ ID NO: 12610 - protein, 16 aa, Artificial Sequence
  Synthetically generated peptide
  VARIANT (1)..(16): Xaa = Any Amino Acid
ACEXWXCANPXACTGC

SEQ ID NO: 12611 - protein, 17 aa, Artificial Sequence
  Synthetically generated peptide
  VARIANT (1)..(17): Xaa = Any Amino Acid
ACEXWXCANPXXACTGC

SEQ ID NO: 12612 - protein, 17 aa, Artificial Sequence
  Synthetically generated peptide
  VARIANT (1)..(17): Xaa = Any Amino Acid
ACEXWXCANPXAXCTGC

SEQ ID NO: 12613 - protein, 17 aa, Artificial Sequence
  Synthetically generated peptide
  VARIANT (1)..(17): Xaa = Any Amino Acid
ACEXWXCANPXACXTGC

SEQ ID NO: 12614 - protein, 17 aa, Artificial Sequence
  Synthetically generated peptide
  VARIANT (1)..(17): Xaa = Any Amino Acid
ACEXWXCANPXACTXGC

SEQ ID NO: 12615 - protein, 17 aa, Artificial Sequence
  Synthetically generated peptide
  VARIANT (1)..(17): Xaa = Any Amino Acid
ACEXWXCANPXACTGXC

SEQ ID NO: 12616 - protein, 16 aa, Artificial Sequence
  Synthetically generated peptide
  VARIANT (1)..(16): Xaa = Any Amino Acid
ACEXWXCANPAXCTGC

SEQ ID NO: 12617 - protein, 17 aa, Artificial Sequence
  Synthetically generated peptide
  VARIANT (1)..(17): Xaa = Any Amino Acid
ACEXWXCANPAXXCTGC

SEQ ID NO: 12618 - protein, 17 aa, Artificial Sequence
  Synthetically generated peptide
  VARIANT (1)..(17): Xaa = Any Amino Acid
ACEXWXCANPAXCXTGC

SEQ ID NO: 12619 - protein, 17 aa, Artificial Sequence
  Synthetically generated peptide
  VARIANT (1)..(17): Xaa = Any Amino Acid
ACEXWXCANPAXCTXGC

SEQ ID NO: 12620 - protein, 17 aa, Artificial Sequence
  Synthetically generated peptide
  VARIANT (1)..(17): Xaa = Any Amino Acid
ACEXWXCANPAXCTGXC

SEQ ID NO: 12621 - protein, 16 aa, Artificial Sequence
  Synthetically generated peptide
  VARIANT (1)..(16): Xaa = Any Amino Acid
ACEXWXCANPACXTGC

SEQ ID NO: 12622 - protein, 17 aa, Artificial Sequence
  Synthetically generated peptide
  VARIANT (1)..(17): Xaa = Any Amino Acid
ACEXWXCANPACXXTGC

SEQ ID NO: 12623 - protein, 17 aa, Artificial Sequence
  Synthetically generated peptide
  VARIANT (1)..(17): Xaa = Any Amino Acid
ACEXWXCANPACXTXGC

SEQ ID NO: 12624 - protein, 17 aa, Artificial Sequence
  Synthetically generated peptide
  VARIANT (1)..(17): Xaa = Any Amino Acid
ACEXWXCANPACXTGXC

SEQ ID NO: 12625 - protein, 16 aa, Artificial Sequence
  Synthetically generated peptide
  VARIANT (1)..(16): Xaa = Any Amino Acid
ACEXWXCANPACTXGC

SEQ ID NO: 12626 - protein, 17 aa, Artificial Sequence
  Synthetically generated peptide
  VARIANT (1)..(17): Xaa = Any Amino Acid
ACEXWXCANPACTXXGC

SEQ ID NO: 12627 - protein, 17 aa, Artificial Sequence
  Synthetically generated peptide
  VARIANT (1)..(17): Xaa = Any Amino Acid
ACEXWXCANPACTXGXC

SEQ ID NO: 12628 - protein, 16 aa, Artificial Sequence
  Synthetically generated peptide
  VARIANT (1)..(16): Xaa = Any Amino Acid
ACEXWXCANPACTGXC

SEQ ID NO: 12629 - protein, 17 aa, Artificial Sequence
  Synthetically generated peptide
  VARIANT (1)..(17): Xaa = Any Amino Acid
ACEXWXCANPACTGXXC

SEQ ID NO: 12630 - protein, 15 aa, Artificial Sequence
  Synthetically generated peptide
  VARIANT (1)..(15): Xaa = Any Amino Acid
ACEXWCAXNPACTGC

SEQ ID NO: 12631 - protein, 16 aa, Artificial Sequence
  Synthetically generated peptide
  VARIANT (1)..(16): Xaa = Any Amino Acid
ACEXWCAXXNPACTGC

SEQ ID NO: 12632 - protein, 17 aa, Artificial Sequence
  Synthetically generated peptide
  VARIANT (1)..(17): Xaa = Any Amino Acid
ACEXWCAXXXNPACTGC

SEQ ID NO: 12633 - protein, 17 aa, Artificial Sequence
  Synthetically generated peptide
  VARIANT (1)..(17): Xaa = Any Amino Acid
ACEXWCAXXNXPACTGC

SEQ ID NO: 12634 - protein, 17 aa, Artificial Sequence
  Synthetically generated peptide
  VARIANT (1)..(17): Xaa = Any Amino Acid
ACEXWCAXXNPXACTGC

SEQ ID NO: 12635 - protein, 17 aa, Artificial Sequence
  Synthetically generated peptide
  VARIANT (1)..(17): Xaa = Any Amino Acid
ACEXWCAXXNPAXCTGC

SEQ ID NO: 12636 - protein, 17 aa, Artificial Sequence
  Synthetically generated peptide
  VARIANT (1)..(17): Xaa = Any Amino Acid
ACEXWCAXXNPACXTGC

SEQ ID NO: 12637 - protein, 17 aa, Artificial Sequence
  Synthetically generated peptide
  VARIANT (1)..(17): Xaa = Any Amino Acid
ACEXWCAXXNPACTXGC

SEQ ID NO: 12638 - protein, 17 aa, Artificial Sequence
  Synthetically generated peptide
  VARIANT (1)..(17): Xaa = Any Amino Acid
ACEXWCAXXNPACTGXC

SEQ ID NO: 12639 - protein, 16 aa, Artificial Sequence
  Synthetically generated peptide
  VARIANT (1)..(16): Xaa = Any Amino Acid
ACEXWCAXNXPACTGC

SEQ ID NO: 12640 - protein, 17 aa, Artificial Sequence
  Synthetically generated peptide
  VARIANT (1)..(17): Xaa = Any Amino Acid
ACEXWCAXNXXPACTGC

SEQ ID NO: 12641 - protein, 17 aa, Artificial Sequence
  Synthetically generated peptide
  VARIANT (1)..(17): Xaa = Any Amino Acid
ACEXWCAXNXPXACTGC

SEQ ID NO: 12642 - protein, 17 aa, Artificial Sequence
  Synthetically generated peptide
  VARIANT (1)..(17): Xaa = Any Amino Acid
ACEXWCAXNXPAXCTGC

SEQ ID NO: 12643 - protein, 17 aa, Artificial Sequence
  Synthetically generated peptide
  VARIANT (1)..(17): Xaa = Any Amino Acid
ACEXWCAXNXPACXTGC

SEQ ID NO: 12644 - protein, 17 aa, Artificial Sequence
  Synthetically generated peptide
  VARIANT (1)..(17): Xaa = Any Amino Acid
ACEXWCAXNXPACTXGC

SEQ ID NO: 12645 - protein, 17 aa, Artificial Sequence
  Synthetically generated peptide
  VARIANT (1)..(17): Xaa = Any Amino Acid
ACEXWCAXNXPACTGXC

SEQ ID NO: 12646 - protein, 16 aa, Artificial Sequence
  Synthetically generated peptide
  VARIANT (1)..(16): Xaa = Any Amino Acid
ACEXWCAXNPXACTGC

SEQ ID NO: 12647 - protein, 17 aa, Artificial Sequence
  Synthetically generated peptide
  VARIANT (1)..(17): Xaa = Any Amino Acid
ACEXWCAXNPXXACTGC

SEQ ID NO: 12648 - protein, 17 aa, Artificial Sequence
  Synthetically generated peptide
  VARIANT (1)..(17): Xaa = Any Amino Acid
ACEXWCAXNPXAXCTGC

SEQ ID NO: 12649 - protein, 17 aa, Artificial Sequence
  Synthetically generated peptide
  VARIANT (1)..(17): Xaa = Any Amino Acid
ACEXWCAXNPXACXTGC

SEQ ID NO: 12650 - protein, 17 aa, Artificial Sequence
  Synthetically generated peptide
  VARIANT (1)..(17): Xaa = Any Amino Acid
ACEXWCAXNPXACTXGC

SEQ ID NO: 12651 - protein, 17 aa, Artificial Sequence
  Synthetically generated peptide
  VARIANT (1)..(17): Xaa = Any Amino Acid
ACEXWCAXNPXACTGXC

SEQ ID NO: 12652 - protein, 16 aa, Artificial Sequence
  Synthetically generated peptide
  VARIANT (1)..(16): Xaa = Any Amino Acid
ACEXWCAXNPAXCTGC

SEQ ID NO: 12653 - protein, 17 aa, Artificial Sequence
  Synthetically generated peptide
  VARIANT (1)..(17): Xaa = Any Amino Acid
ACEXWCAXNPAXXCTGC

SEQ ID NO: 12654 - protein, 17 aa, Artificial Sequence
  Synthetically generated peptide
  VARIANT (1)..(17): Xaa = Any Amino Acid
ACEXWCAXNPAXCXTGC

SEQ ID NO: 12655 - protein, 17 aa, Artificial Sequence
  Synthetically generated peptide
  VARIANT (1)..(17): Xaa = Any Amino Acid
ACEXWCAXNPAXCTXGC

SEQ ID NO: 12656 - protein, 17 aa, Artificial Sequence
  Synthetically generated peptide
  VARIANT (1)..(17): Xaa = Any Amino Acid
ACEXWCAXNPAXCTGXC

SEQ ID NO: 12657 - protein, 16 aa, Artificial Sequence
  Synthetically generated peptide
  VARIANT (1)..(16): Xaa = Any Amino Acid
ACEXWCAXNPACXTGC

SEQ ID NO: 12658 - protein, 17 aa, Artificial Sequence
  Synthetically generated peptide
  VARIANT (1)..(17): Xaa = Any Amino Acid
ACEXWCAXNPACXXTGC

SEQ ID NO: 12659 - protein, 17 aa, Artificial Sequence
  Synthetically generated peptide
  VARIANT (1)..(17): Xaa = Any Amino Acid
ACEXWCAXNPACXTXGC

SEQ ID NO: 12660 - protein, 17 aa, Artificial Sequence
  Synthetically generated peptide
  VARIANT (1)..(17): Xaa = Any Amino Acid
ACEXWCAXNPACXTGXC

SEQ ID NO: 12661 - protein, 16 aa, Artificial Sequence
  Synthetically generated peptide
  VARIANT (1)..(16): Xaa = Any Amino Acid
ACEXWCAXNPACTXGC

SEQ ID NO: 12662 - protein, 17 aa, Artificial Sequence
  Synthetically generated peptide
  VARIANT (1)..(17): Xaa = Any Amino Acid
ACEXWCAXNPACTXXGC

SEQ ID NO: 12663 - protein, 17 aa, Artificial Sequence
  Synthetically generated peptide
  VARIANT (1)..(17): Xaa = Any Amino Acid
ACEXWCAXNPACTXGXC

SEQ ID NO: 12664 - protein, 16 aa, Artificial Sequence
  Synthetically generated peptide
  VARIANT (1)..(16): Xaa = Any Amino Acid
ACEXWCAXNPACTGXC

SEQ ID NO: 12665 - protein, 17 aa, Artificial Sequence
  Synthetically generated peptide
  VARIANT (1)..(17): Xaa = Any Amino Acid
ACEXWCAXNPACTGXXC

SEQ ID NO: 12666 - protein, 15 aa, Artificial Sequence
  Synthetically generated peptide
  VARIANT (1)..(15): Xaa = Any Amino Acid
ACEXWCANXPACTGC

SEQ ID NO: 12667 - protein, 16 aa, Artificial Sequence
  Synthetically generated peptide
  VARIANT (1)..(16): Xaa = Any Amino Acid
ACEXWCANXXPACTGC

SEQ ID NO: 12668 - protein, 17 aa, Artificial Sequence
  Synthetically generated peptide
  VARIANT (1)..(17): Xaa = Any Amino Acid
ACEXWCANXXXPACTGC

SEQ ID NO: 12669 - protein, 17 aa, Artificial Sequence
  Synthetically generated peptide
  VARIANT (1)..(17): Xaa = Any Amino Acid
ACEXWCANXXPXACTGC

SEQ ID NO: 12670 - protein, 17 aa, Artificial Sequence
  Synthetically generated peptide
  VARIANT (1)..(17): Xaa = Any Amino Acid
ACEXWCANXXPAXCTGC

SEQ ID NO: 12671 - protein, 17 aa, Artificial Sequence
  Synthetically generated peptide
  VARIANT (1)..(17): Xaa = Any Amino Acid
ACEXWCANXXPACXTGC

SEQ ID NO: 12672 - protein, 17 aa, Artificial Sequence
  Synthetically generated peptide
  VARIANT (1)..(17): Xaa = Any Amino Acid
ACEXWCANXXPACTXGC

SEQ ID NO: 12673 - protein, 17 aa, Artificial Sequence
  Synthetically generated peptide
  VARIANT (1)..(17): Xaa = Any Amino Acid
ACEXWCANXXPACTGXC

SEQ ID NO: 12674 - protein, 16 aa, Artificial Sequence
  Synthetically generated peptide
  VARIANT (1)..(16): Xaa = Any Amino Acid
ACEXWCANXPXACTGC

SEQ ID NO: 12675 - protein, 17 aa, Artificial Sequence
  Synthetically generated peptide
  VARIANT (1)..(17): Xaa = Any Amino Acid
ACEXWCANXPXXACTGC

SEQ ID NO: 12676 - protein, 17 aa, Artificial Sequence
  Synthetically generated peptide
  VARIANT (1)..(17): Xaa = Any Amino Acid
ACEXWCANXPXAXCTGC

SEQ ID NO: 12677 - protein, 17 aa, Artificial Sequence
  Synthetically generated peptide
  VARIANT (1)..(17): Xaa = Any Amino Acid
ACEXWCANXPXACXTGC

SEQ ID NO: 12678 - protein, 17 aa, Artificial Sequence
  Synthetically generated peptide
  VARIANT (1)..(17): Xaa = Any Amino Acid
ACEXWCANXPXACTXGC

SEQ ID NO: 12679 - protein, 17 aa, Artificial Sequence
  Synthetically generated peptide
  VARIANT (1)..(17): Xaa = Any Amino Acid
ACEXWCANXPXACTGXC

SEQ ID NO: 12680 - protein, 16 aa, Artificial Sequence
  Synthetically generated peptide
  VARIANT (1)..(16): Xaa = Any Amino Acid
ACEXWCANXPAXCTGC

SEQ ID NO: 12681 - protein, 17 aa, Artificial Sequence
  Synthetically generated peptide
  VARIANT (1)..(17): Xaa = Any Amino Acid
ACEXWCANXPAXXCTGC

SEQ ID NO: 12682 - protein, 17 aa, Artificial Sequence
  Synthetically generated peptide
  VARIANT (1)..(17): Xaa = Any Amino Acid
ACEXWCANXPAXCXTGC

SEQ ID NO: 12683 - protein, 17 aa, Artificial Sequence
  Synthetically generated peptide
  VARIANT (1)..(17): Xaa = Any Amino Acid
ACEXWCANXPAXCTXGC

SEQ ID NO: 12684 - protein, 17 aa, Artificial Sequence
  Synthetically generated peptide
  VARIANT (1)..(17): Xaa = Any Amino Acid
ACEXWCANXPAXCTGXC

SEQ ID NO: 12685 - protein, 16 aa, Artificial Sequence
  Synthetically generated peptide
  VARIANT (1)..(16): Xaa = Any Amino Acid
ACEXWCANXPACXTGC

SEQ ID NO: 12686 - protein, 17 aa, Artificial Sequence
  Synthetically generated peptide
  VARIANT (1)..(17): Xaa = Any Amino Acid
ACEXWCANXPACXXTGC

SEQ ID NO: 12687 - protein, 17 aa, Artificial Sequence
  Synthetically generated peptide
  VARIANT (1)..(17): Xaa = Any Amino Acid
ACEXWCANXPACXTXGC

SEQ ID NO: 12688 - protein, 17 aa, Artificial Sequence
  Synthetically generated peptide
  VARIANT (1)..(17): Xaa = Any Amino Acid
ACEXWCANXPACXTGXC

SEQ ID NO: 12689 - protein, 16 aa, Artificial Sequence
  Synthetically generated peptide
  VARIANT (1)..(16): Xaa = Any Amino Acid
ACEXWCANXPACTXGC

SEQ ID NO: 12690 - protein, 17 aa, Artificial Sequence
  Synthetically generated peptide
  VARIANT (1)..(17): Xaa = Any Amino Acid
ACEXWCANXPACTXXGC

SEQ ID NO: 12691 - protein, 17 aa, Artificial Sequence
  Synthetically generated peptide
  VARIANT (1)..(17): Xaa = Any Amino Acid
ACEXWCANXPACTXGXC

SEQ ID NO: 12692 - protein, 16 aa, Artificial Sequence
  Synthetically generated peptide
  VARIANT (1)..(16): Xaa = Any Amino Acid
ACEXWCANXPACTGXC

SEQ ID NO: 12693 - protein, 17 aa, Artificial Sequence
  Synthetically generated peptide
  VARIANT (1)..(17): Xaa = Any Amino Acid
ACEXWCANXPACTGXXC

SEQ ID NO: 12694 - protein, 15 aa, Artificial Sequence
  Synthetically generated peptide
  VARIANT (1)..(15): Xaa = Any Amino Acid
ACEXWCANPXACTGC

SEQ ID NO: 12695 - protein, 16 aa, Artificial Sequence
  Synthetically generated peptide
  VARIANT (1)..(16): Xaa = Any Amino Acid
ACEXWCANPXXACTGC

SEQ ID NO: 12696 - protein, 17 aa, Artificial Sequence
  Synthetically generated peptide
  VARIANT (1)..(17): Xaa = Any Amino Acid
ACEXWCANPXXXACTGC

SEQ ID NO: 12697 - protein, 17 aa, Artificial Sequence
  Synthetically generated peptide
  VARIANT (1)..(17): Xaa = Any Amino Acid
ACEXWCANPXXAXCTGC

SEQ ID NO: 12698 - protein, 17 aa, Artificial Sequence
  Synthetically generated peptide
  VARIANT (1)..(17): Xaa = Any Amino Acid
ACEXWCANPXXACXTGC

SEQ ID NO: 12699 - protein, 17 aa, Artificial Sequence
  Synthetically generated peptide
  VARIANT (1)..(17): Xaa = Any Amino Acid
ACEXWCANPXXACTXGC

SEQ ID NO: 12700 - protein, 17 aa, Artificial Sequence
  Synthetically generated peptide
  VARIANT (1)..(17): Xaa = Any Amino Acid
ACEXWCANPXXACTGXC

SEQ ID NO: 12701 - protein, 16 aa, Artificial Sequence
  Synthetically generated peptide
  VARIANT (1)..(16): Xaa = Any Amino Acid
ACEXWCANPXAXCTGC

SEQ ID NO: 12702 - protein, 17 aa, Artificial Sequence
  Synthetically generated peptide
  VARIANT (1)..(17): Xaa = Any Amino Acid
ACEXWCANPXAXXCTGC

SEQ ID NO: 12703 - protein, 17 aa, Artificial Sequence
  Synthetically generated peptide
  VARIANT (1)..(17): Xaa = Any Amino Acid
ACEXWCANPXAXCXTGC

SEQ ID NO: 12704 - protein, 17 aa, Artificial Sequence
  Synthetically generated peptide
  VARIANT (1)..(17): Xaa = Any Amino Acid
ACEXWCANPXAXCTXGC

SEQ ID NO: 12705 - protein, 17 aa, Artificial Sequence
  Synthetically generated peptide
  VARIANT (1)..(17): Xaa = Any Amino Acid
ACEXWCANPXAXCTGXC

SEQ ID NO: 12706 - protein, 16 aa, Artificial Sequence
  Synthetically generated peptide
  VARIANT (1)..(16): Xaa = Any Amino Acid
ACEXWCANPXACXTGC

SEQ ID NO: 12707 - protein, 17 aa, Artificial Sequence
  Synthetically generated peptide
  VARIANT (1)..(17): Xaa = Any Amino Acid
ACEXWCANPXACXXTGC

SEQ ID NO: 12708 - protein, 17 aa, Artificial Sequence
  Synthetically generated peptide
  VARIANT (1)..(17): Xaa = Any Amino Acid
ACEXWCANPXACXTXGC

SEQ ID NO: 12709 - protein, 17 aa, Artificial Sequence
  Synthetically generated peptide
  VARIANT (1)..(17): Xaa = Any Amino Acid
ACEXWCANPXACXTGXC

SEQ ID NO: 12710 - protein, 16 aa, Artificial Sequence
  Synthetically generated peptide
  VARIANT (1)..(16): Xaa = Any Amino Acid
ACEXWCANPXACTXGC

SEQ ID NO: 12711 - protein, 17 aa, Artificial Sequence
  Synthetically generated peptide
  VARIANT (1)..(17): Xaa = Any Amino Acid
ACEXWCANPXACTXXGC

SEQ ID NO: 12712 - protein, 17 aa, Artificial Sequence
  Synthetically generated peptide
  VARIANT (1)..(17): Xaa = Any Amino Acid
ACEXWCANPXACTXGXC

SEQ ID NO: 12713 - protein, 16 aa, Artificial Sequence
  Synthetically generated peptide
  VARIANT (1)..(16): Xaa = Any Amino Acid
ACEXWCANPXACTGXC

SEQ ID NO: 12714 - protein, 17 aa, Artificial Sequence
  Synthetically generated peptide
  VARIANT (1)..(17): Xaa = Any Amino Acid
ACEXWCANPXACTGXXC

SEQ ID NO: 12715 - protein, 15 aa, Artificial Sequence
  Synthetically generated peptide
  VARIANT (1)..(15): Xaa = Any Amino Acid
ACEXWCANPAXCTGC

SEQ ID NO: 12716 - protein, 16 aa, Artificial Sequence
  Synthetically generated peptide
  VARIANT (1)..(16): Xaa = Any Amino Acid
ACEXWCANPAXXCTGC

SEQ ID NO: 12717 - protein, 17 aa, Artificial Sequence
  Synthetically generated peptide
  VARIANT (1)..(17): Xaa = Any Amino Acid
ACEXWCANPAXXXCTGC

SEQ ID NO: 12718 - protein, 17 aa, Artificial Sequence
  Synthetically generated peptide
  VARIANT (1)..(17): Xaa = Any Amino Acid
ACEXWCANPAXXCXTGC

SEQ ID NO: 12719 - protein, 17 aa, Artificial Sequence
  Synthetically generated peptide
  VARIANT (1)..(17): Xaa = Any Amino Acid
ACEXWCANPAXXCTXGC

SEQ ID NO: 12720 - protein, 17 aa, Artificial Sequence
  Synthetically generated peptide
  VARIANT (1)..(17): Xaa = Any Amino Acid
ACEXWCANPAXXCTGXC

SEQ ID NO: 12721 - protein, 16 aa, Artificial Sequence
  Synthetically generated peptide
  VARIANT (1)..(16): Xaa = Any Amino Acid
ACEXWCANPAXCXTGC

SEQ ID NO: 12722 - protein, 17 aa, Artificial Sequence
  Synthetically generated peptide
  VARIANT (1)..(17): Xaa = Any Amino Acid
ACEXWCANPAXCXXTGC

SEQ ID NO: 12723 - protein, 17 aa, Artificial Sequence
  Synthetically generated peptide
  VARIANT (1)..(17): Xaa = Any Amino Acid
ACEXWCANPAXCXTXGC

SEQ ID NO: 12724 - protein, 17 aa, Artificial Sequence
  Synthetically generated peptide
  VARIANT (1)..(17): Xaa = Any Amino Acid
ACEXWCANPAXCXTGXC

SEQ ID NO: 12725 - protein, 16 aa, Artificial Sequence
  Synthetically generated peptide
  VARIANT (1)..(16): Xaa = Any Amino Acid
ACEXWCANPAXCTXGC

SEQ ID NO: 12726 - protein, 17 aa, Artificial Sequence
  Synthetically generated peptide
  VARIANT (1)..(17): Xaa = Any Amino Acid
ACEXWCANPAXCTXXGC

SEQ ID NO: 12727 - protein, 17 aa, Artificial Sequence
  Synthetically generated peptide
  VARIANT (1)..(17): Xaa = Any Amino Acid
ACEXWCANPAXCTXGXC

SEQ ID NO: 12728 - protein, 16 aa, Artificial Sequence
  Synthetically generated peptide
  VARIANT (1)..(16): Xaa = Any Amino Acid
ACEXWCANPAXCTGXC

SEQ ID NO: 12729 - protein, 17 aa, Artificial Sequence
  Synthetically generated peptide
  VARIANT (1)..(17): Xaa = Any Amino Acid
ACEXWCANPAXCTGXXC

SEQ ID NO: 12730 - protein, 15 aa, Artificial Sequence
  Synthetically generated peptide
  VARIANT (1)..(15): Xaa = Any Amino Acid
ACEXWCANPACXTGC

SEQ ID NO: 12731 - protein, 16 aa, Artificial Sequence
  Synthetically generated peptide
  VARIANT (1)..(16): Xaa = Any Amino Acid
ACEXWCANPACXXTGC

SEQ ID NO: 12732 - protein, 17 aa, Artificial Sequence
  Synthetically generated peptide
  VARIANT (1)..(17): Xaa = Any Amino Acid
ACEXWCANPACXXXTGC

SEQ ID NO: 12733 - protein, 17 aa, Artificial Sequence
  Synthetically generated peptide
  VARIANT (1)..(17): Xaa = Any Amino Acid
ACEXWCANPACXXTXGC

SEQ ID NO: 12734 - protein, 17 aa, Artificial Sequence
  Synthetically generated peptide
  VARIANT (1)..(17): Xaa = Any Amino Acid
ACEXWCANPACXXTGXC

SEQ ID NO: 12735 - protein, 16 aa, Artificial Sequence
  Synthetically generated peptide
  VARIANT (1)..(16): Xaa = Any Amino Acid
ACEXWCANPACXTXGC

SEQ ID NO: 12736 - protein, 17 aa, Artificial Sequence
  Synthetically generated peptide
  VARIANT (1)..(17): Xaa = Any Amino Acid
ACEXWCANPACXTXXGC

SEQ ID NO: 12737 - protein, 17 aa, Artificial Sequence
  Synthetically generated peptide
  VARIANT (1)..(17): Xaa = Any Amino Acid
ACEXWCANPACXTXGXC

SEQ ID NO: 12738 - protein, 16 aa, Artificial Sequence
  Synthetically generated peptide
  VARIANT (1)..(16): Xaa = Any Amino Acid
ACEXWCANPACXTGXC

SEQ ID NO: 12739 - protein, 17 aa, Artificial Sequence
  Synthetically generated peptide
  VARIANT (1)..(17): Xaa = Any Amino Acid
ACEXWCANPACXTGXXC

SEQ ID NO: 12740 - protein, 15 aa, Artificial Sequence
  Synthetically generated peptide
  VARIANT (1)..(15): Xaa = Any Amino Acid
ACEXWCANPACTXGC

SEQ ID NO: 12741 - protein, 16 aa, Artificial Sequence
  Synthetically generated peptide
  VARIANT (1)..(16): Xaa = Any Amino Acid
ACEXWCANPACTXXGC

SEQ ID NO: 12742 - protein, 17 aa, Artificial Sequence
  Synthetically generated peptide
  VARIANT (1)..(17): Xaa = Any Amino Acid
ACEXWCANPACTXXXGC

SEQ ID NO: 12743 - protein, 17 aa, Artificial Sequence
  Synthetically generated peptide
  VARIANT (1)..(17): Xaa = Any Amino Acid
ACEXWCANPACTXXGXC

SEQ ID NO: 12744 - protein, 16 aa, Artificial Sequence
  Synthetically generated peptide
  VARIANT (1)..(16): Xaa = Any Amino Acid
ACEXWCANPACTXGXC

SEQ ID NO: 12745 - protein, 17 aa, Artificial Sequence
  Synthetically generated peptide
  VARIANT (1)..(17): Xaa = Any Amino Acid
ACEXWCANPACTXGXXC

SEQ ID NO: 12746 - protein, 15 aa, Artificial Sequence
  Synthetically generated peptide
  VARIANT (1)..(15): Xaa = Any Amino Acid
ACEXWCANPACTGXC

SEQ ID NO: 12747 - protein, 16 aa, Artificial Sequence
  Synthetically generated peptide
  VARIANT (1)..(16): Xaa = Any Amino Acid
ACEXWCANPACTGXXC

SEQ ID NO: 12748 - protein, 17 aa, Artificial Sequence
  Synthetically generated peptide
  VARIANT (1)..(17): Xaa = Any Amino Acid
ACEXWCANPACTGXXXC

SEQ ID NO: 12749 - protein, 14 aa, Artificial Sequence
  Synthetically generated peptide
  VARIANT (1)..(14): Xaa = Any Amino Acid
ACEWXCANPACTGC

SEQ ID NO: 12750 - protein, 15 aa, Artificial Sequence
  Synthetically generated peptide
  VARIANT (1)..(15): Xaa = Any Amino Acid
ACEWXXCANPACTGC

SEQ ID NO: 12751 - protein, 16 aa, Artificial Sequence
  Synthetically generated peptide
  VARIANT (1)..(16): Xaa = Any Amino Acid
ACEWXXXCANPACTGC

SEQ ID NO: 12752 - protein, 17 aa, Artificial Sequence
  Synthetically generated peptide
  VARIANT (1)..(17): Xaa = Any Amino Acid
ACEWXXXXCANPACTGC

SEQ ID NO: 12753 - protein, 17 aa, Artificial Sequence
  Synthetically generated peptide
  VARIANT (1)..(17): Xaa = Any Amino Acid
ACEWXXXCAXNPACTGC

SEQ ID NO: 12754 - protein, 17 aa, Artificial Sequence
  Synthetically generated peptide
  VARIANT (1)..(17): Xaa = Any Amino Acid
ACEWXXXCANXPACTGC

SEQ ID NO: 12755 - protein, 17 aa, Artificial Sequence
  Synthetically generated peptide
  VARIANT (1)..(17): Xaa = Any Amino Acid
ACEWXXXCANPXACTGC

SEQ ID NO: 12756 - protein, 17 aa, Artificial Sequence
  Synthetically generated peptide
  VARIANT (1)..(17): Xaa = Any Amino Acid
ACEWXXXCANPAXCTGC

SEQ ID NO: 12757 - protein, 17 aa, Artificial Sequence
  Synthetically generated peptide
  VARIANT (1)..(17): Xaa = Any Amino Acid
ACEWXXXCANPACXTGC

SEQ ID NO: 12758 - protein, 17 aa, Artificial Sequence
  Synthetically generated peptide
  VARIANT (1)..(17): Xaa = Any Amino Acid
ACEWXXXCANPACTXGC

SEQ ID NO: 12759 - protein, 17 aa, Artificial Sequence
  Synthetically generated peptide
  VARIANT (1)..(17): Xaa = Any Amino Acid
ACEWXXXCANPACTGXC

SEQ ID NO: 12760 - protein, 16 aa, Artificial Sequence
  Synthetically generated peptide
  VARIANT (1)..(16): Xaa = Any Amino Acid
ACEWXXCAXNPACTGC

SEQ ID NO: 12761 - protein, 17 aa, Artificial Sequence
  Synthetically generated peptide
  VARIANT (1)..(17): Xaa = Any Amino Acid
ACEWXXCAXXNPACTGC

SEQ ID NO: 12762 - protein, 17 aa, Artificial Sequence
  Synthetically generated peptide
  VARIANT (1)..(17): Xaa = Any Amino Acid
ACEWXXCAXNXPACTGC

SEQ ID NO: 12763 - protein, 17 aa, Artificial Sequence
  Synthetically generated peptide
  VARIANT (1)..(17): Xaa = Any Amino Acid
ACEWXXCAXNPXACTGC

SEQ ID NO: 12764 - protein, 17 aa, Artificial Sequence
  Synthetically generated peptide
  VARIANT (1)..(17): Xaa = Any Amino Acid
ACEWXXCAXNPAXCTGC

SEQ ID NO: 12765 - protein, 17 aa, Artificial Sequence
  Synthetically generated peptide
  VARIANT (1)..(17): Xaa = Any Amino Acid
ACEWXXCAXNPACXTGC

SEQ ID NO: 12766 - protein, 17 aa, Artificial Sequence
  Synthetically generated peptide
  VARIANT (1)..(17): Xaa = Any Amino Acid
ACEWXXCAXNPACTXGC

SEQ ID NO: 12767 - protein, 17 aa, Artificial Sequence
  Synthetically generated peptide
  VARIANT (1)..(17): Xaa = Any Amino Acid
ACEWXXCAXNPACTGXC

SEQ ID NO: 12768 - protein, 16 aa, Artificial Sequence
  Synthetically generated peptide
  VARIANT (1)..(16): Xaa = Any Amino Acid
ACEWXXCANXPACTGC

SEQ ID NO: 12769 - protein, 17 aa, Artificial Sequence
  Synthetically generated peptide
  VARIANT (1)..(17): Xaa = Any Amino Acid
ACEWXXCANXXPACTGC

SEQ ID NO: 12770 - protein, 17 aa, Artificial Sequence
  Synthetically generated peptide
  VARIANT (1)..(17): Xaa = Any Amino Acid
ACEWXXCANXPXACTGC

SEQ ID NO: 12771 - protein, 17 aa, Artificial Sequence
  Synthetically generated peptide
  VARIANT (1)..(17): Xaa = Any Amino Acid
ACEWXXCANXPAXCTGC

SEQ ID NO: 12772 - protein, 17 aa, Artificial Sequence
  Synthetically generated peptide
  VARIANT (1)..(17): Xaa = Any Amino Acid
ACEWXXCANXPACXTGC

SEQ ID NO: 12773 - protein, 17 aa, Artificial Sequence
  Synthetically generated peptide
  VARIANT (1)..(17): Xaa = Any Amino Acid
ACEWXXCANXPACTXGC

SEQ ID NO: 12774 - protein, 17 aa, Artificial Sequence
  Synthetically generated peptide
  VARIANT (1)..(17): Xaa = Any Amino Acid
ACEWXXCANXPACTGXC

SEQ ID NO: 12775 - protein, 16 aa, Artificial Sequence
  Synthetically generated peptide
  VARIANT (1)..(16): Xaa = Any Amino Acid
ACEWXXCANPXACTGC

SEQ ID NO: 12776 - protein, 17 aa, Artificial Sequence
  Synthetically generated peptide
  VARIANT (1)..(17): Xaa = Any Amino Acid
ACEWXXCANPXXACTGC

SEQ ID NO: 12777 - protein, 17 aa, Artificial Sequence
  Synthetically generated peptide
  VARIANT (1)..(17): Xaa = Any Amino Acid
ACEWXXCANPXAXCTGC

SEQ ID NO: 12778 - protein, 17 aa, Artificial Sequence
  Synthetically generated peptide
  VARIANT (1)..(17): Xaa = Any Amino Acid
ACEWXXCANPXACXTGC

SEQ ID NO: 12779 - protein, 17 aa, Artificial Sequence
  Synthetically generated peptide
  VARIANT (1)..(17): Xaa = Any Amino Acid
ACEWXXCANPXACTXGC

SEQ ID NO: 12780 - protein, 17 aa, Artificial Sequence
  Synthetically generated peptide
  VARIANT (1)..(17): Xaa = Any Amino Acid
ACEWXXCANPXACTGXC

SEQ ID NO: 12781 - protein, 16 aa, Artificial Sequence
  Synthetically generated peptide
  VARIANT (1)..(16): Xaa = Any Amino Acid
ACEWXXCANPAXCTGC

SEQ ID NO: 12782 - protein, 17 aa, Artificial Sequence
  Synthetically generated peptide
  VARIANT (1)..(17): Xaa = Any Amino Acid
ACEWXXCANPAXXCTGC

SEQ ID NO: 12783 - protein, 17 aa, Artificial Sequence
  Synthetically generated peptide
  VARIANT (1)..(17): Xaa = Any Amino Acid
ACEWXXCANPAXCXTGC

SEQ ID NO: 12784 - protein, 17 aa, Artificial Sequence
  Synthetically generated peptide
  VARIANT (1)..(17): Xaa = Any Amino Acid
ACEWXXCANPAXCTXGC

SEQ ID NO: 12785 - protein, 17 aa, Artificial Sequence
  Synthetically generated peptide
  VARIANT (1)..(17): Xaa = Any Amino Acid
ACEWXXCANPAXCTGXC

SEQ ID NO: 12786 - protein, 16 aa, Artificial Sequence
  Synthetically generated peptide
  VARIANT (1)..(16): Xaa = Any Amino Acid
ACEWXXCANPACXTGC

SEQ ID NO: 12787 - protein, 17 aa, Artificial Sequence
  Synthetically generated peptide
  VARIANT (1)..(17): Xaa = Any Amino Acid
ACEWXXCANPACXXTGC

SEQ ID NO: 12788 - protein, 17 aa, Artificial Sequence
  Synthetically generated peptide
  VARIANT (1)..(17): Xaa = Any Amino Acid
ACEWXXCANPACXTXGC

SEQ ID NO: 12789 - protein, 17 aa, Artificial Sequence
  Synthetically generated peptide
  VARIANT (1)..(17): Xaa = Any Amino Acid
ACEWXXCANPACXTGXC

SEQ ID NO: 12790 - protein, 16 aa, Artificial Sequence
  Synthetically generated peptide
  VARIANT (1)..(16): Xaa = Any Amino Acid
ACEWXXCANPACTXGC

SEQ ID NO: 12791 - protein, 17 aa, Artificial Sequence
  Synthetically generated peptide
  VARIANT (1)..(17): Xaa = Any Amino Acid
ACEWXXCANPACTXXGC

SEQ ID NO: 12792 - protein, 17 aa, Artificial Sequence
  Synthetically generated peptide
  VARIANT (1)..(17): Xaa = Any Amino Acid
ACEWXXCANPACTXGXC

SEQ ID NO: 12793 - protein, 16 aa, Artificial Sequence
  Synthetically generated peptide
  VARIANT (1)..(16): Xaa = Any Amino Acid
ACEWXXCANPACTGXC

SEQ ID NO: 12794 - protein, 17 aa, Artificial Sequence
  Synthetically generated peptide
  VARIANT (1)..(17): Xaa = Any Amino Acid
ACEWXXCANPACTGXXC

SEQ ID NO: 12795 - protein, 15 aa, Artificial Sequence
  Synthetically generated peptide
  VARIANT (1)..(15): Xaa = Any Amino Acid
ACEWXCAXNPACTGC

SEQ ID NO: 12796 - protein, 16 aa, Artificial Sequence
  Synthetically generated peptide
  VARIANT (1)..(16): Xaa = Any Amino Acid
ACEWXCAXXNPACTGC

SEQ ID NO: 12797 - protein, 17 aa, Artificial Sequence
  Synthetically generated peptide
  VARIANT (1)..(17): Xaa = Any Amino Acid
ACEWXCAXXXNPACTGC

SEQ ID NO: 12798 - protein, 17 aa, Artificial Sequence
  Synthetically generated peptide
  VARIANT (1)..(17): Xaa = Any Amino Acid
ACEWXCAXXNXPACTGC

SEQ ID NO: 12799 - protein, 17 aa, Artificial Sequence
  Synthetically generated peptide
  VARIANT (1)..(17): Xaa = Any Amino Acid
ACEWXCAXXNPXACTGC

SEQ ID NO: 12800 - protein, 17 aa, Artificial Sequence
  Synthetically generated peptide
  VARIANT (1)..(17): Xaa = Any Amino Acid
ACEWXCAXXNPAXCTGC

SEQ ID NO: 12801 - protein, 17 aa, Artificial Sequence
  Synthetically generated peptide
  VARIANT (1)..(17): Xaa = Any Amino Acid
ACEWXCAXXNPACXTGC

SEQ ID NO: 12802 - protein, 17 aa, Artificial Sequence
  Synthetically generated peptide
  VARIANT (1)..(17): Xaa = Any Amino Acid
ACEWXCAXXNPACTXGC

SEQ ID NO: 12803 - protein, 17 aa, Artificial Sequence
  Synthetically generated peptide
  VARIANT (1)..(17): Xaa = Any Amino Acid
ACEWXCAXXNPACTGXC

SEQ ID NO: 12804 - protein, 16 aa, Artificial Sequence
  Synthetically generated peptide
  VARIANT (1)..(16): Xaa = Any Amino Acid
ACEWXCAXNXPACTGC

SEQ ID NO: 12805 - protein, 17 aa, Artificial Sequence
  Synthetically generated peptide
  VARIANT (1)..(17): Xaa = Any Amino Acid
ACEWXCAXNXXPACTGC

SEQ ID NO: 12806 - protein, 17 aa, Artificial Sequence
  Synthetically generated peptide
  VARIANT (1)..(17): Xaa = Any Amino Acid
ACEWXCAXNXPXACTGC

SEQ ID NO: 12807 - protein, 17 aa, Artificial Sequence
  Synthetically generated peptide
  VARIANT (1)..(17): Xaa = Any Amino Acid
ACEWXCAXNXPAXCTGC

SEQ ID NO: 12808 - protein, 17 aa, Artificial Sequence
  Synthetically generated peptide
  VARIANT (1)..(17): Xaa = Any Amino Acid
ACEWXCAXNXPACXTGC

SEQ ID NO: 12809 - protein, 17 aa, Artificial Sequence
  Synthetically generated peptide
  VARIANT (1)..(17): Xaa = Any Amino Acid
ACEWXCAXNXPACTXGC

SEQ ID NO: 12810 - protein, 17 aa, Artificial Sequence
  Synthetically generated peptide
  VARIANT (1)..(17): Xaa = Any Amino Acid
ACEWXCAXNXPACTGXC

SEQ ID NO: 12811 - protein, 16 aa, Artificial Sequence
  Synthetically generated peptide
  VARIANT (1)..(16): Xaa = Any Amino Acid
ACEWXCAXNPXACTGC

SEQ ID NO: 12812 - protein, 17 aa, Artificial Sequence
  Synthetically generated peptide
  VARIANT (1)..(17): Xaa = Any Amino Acid
ACEWXCAXNPXXACTGC

SEQ ID NO: 12813 - protein, 17 aa, Artificial Sequence
  Synthetically generated peptide
  VARIANT (1)..(17): Xaa = Any Amino Acid
ACEWXCAXNPXAXCTGC

SEQ ID NO: 12814 - protein, 17 aa, Artificial Sequence
  Synthetically generated peptide
  VARIANT (1)..(17): Xaa = Any Amino Acid
ACEWXCAXNPXACXTGC

SEQ ID NO: 12815 - protein, 17 aa, Artificial Sequence
  Synthetically generated peptide
  VARIANT (1)..(17): Xaa = Any Amino Acid
ACEWXCAXNPXACTXGC

SEQ ID NO: 12816 - protein, 17 aa, Artificial Sequence
  Synthetically generated peptide
  VARIANT (1)..(17): Xaa = Any Amino Acid
ACEWXCAXNPXACTGXC

SEQ ID NO: 12817 - protein, 16 aa, Artificial Sequence
  Synthetically generated peptide
  VARIANT (1)..(16): Xaa = Any Amino Acid
ACEWXCAXNPAXCTGC

SEQ ID NO: 12818 - protein, 17 aa, Artificial Sequence
  Synthetically generated peptide
  VARIANT (1)..(17): Xaa = Any Amino Acid
ACEWXCAXNPAXXCTGC

SEQ ID NO: 12819 - protein, 17 aa, Artificial Sequence
  Synthetically generated peptide
  VARIANT (1)..(17): Xaa = Any Amino Acid
ACEWXCAXNPAXCXTGC

SEQ ID NO: 12820 - protein, 17 aa, Artificial Sequence
  Synthetically generated peptide
  VARIANT (1)..(17): Xaa = Any Amino Acid
ACEWXCAXNPAXCTXGC

SEQ ID NO: 12821 - protein, 17 aa, Artificial Sequence
  Synthetically generated peptide
  VARIANT (1)..(17): Xaa = Any Amino Acid
ACEWXCAXNPAXCTGXC

SEQ ID NO: 12822 - protein, 16 aa, Artificial Sequence
  Synthetically generated peptide
  VARIANT (1)..(16): Xaa = Any Amino Acid
ACEWXCAXNPACXTGC

SEQ ID NO: 12823 - protein, 17 aa, Artificial Sequence
  Synthetically generated peptide
  VARIANT (1)..(17): Xaa = Any Amino Acid
ACEWXCAXNPACXXTGC

SEQ ID NO: 12824 - protein, 17 aa, Artificial Sequence
  Synthetically generated peptide
  VARIANT (1)..(17): Xaa = Any Amino Acid
ACEWXCAXNPACXTXGC

SEQ ID NO: 12825 - protein, 17 aa, Artificial Sequence
  Synthetically generated peptide
  VARIANT (1)..(17): Xaa = Any Amino Acid
ACEWXCAXNPACXTGXC

SEQ ID NO: 12826 - protein, 16 aa, Artificial Sequence
  Synthetically generated peptide
  VARIANT (1)..(16): Xaa = Any Amino Acid
ACEWXCAXNPACTXGC

SEQ ID NO: 12827 - protein, 17 aa, Artificial Sequence
  Synthetically generated peptide
  VARIANT (1)..(17): Xaa = Any Amino Acid
ACEWXCAXNPACTXXGC

SEQ ID NO: 12828 - protein, 17 aa, Artificial Sequence
  Synthetically generated peptide
  VARIANT (1)..(17): Xaa = Any Amino Acid
ACEWXCAXNPACTXGXC

SEQ ID NO: 12829 - protein, 16 aa, Artificial Sequence
  Synthetically generated peptide
  VARIANT (1)..(16): Xaa = Any Amino Acid
ACEWXCAXNPACTGXC

SEQ ID NO: 12830 - protein, 17 aa, Artificial Sequence
  Synthetically generated peptide
  VARIANT (1)..(17): Xaa = Any Amino Acid
ACEWXCAXNPACTGXXC

SEQ ID NO: 12831 - protein, 15 aa, Artificial Sequence
  Synthetically generated peptide
  VARIANT (1)..(15): Xaa = Any Amino Acid
ACEWXCANXPACTGC

SEQ ID NO: 12832 - protein, 16 aa, Artificial Sequence
  Synthetically generated peptide
  VARIANT (1)..(16): Xaa = Any Amino Acid
ACEWXCANXXPACTGC

SEQ ID NO: 12833 - protein, 17 aa, Artificial Sequence
  Synthetically generated peptide
  VARIANT (1)..(17): Xaa = Any Amino Acid
ACEWXCANXXXPACTGC

SEQ ID NO: 12834 - protein, 17 aa, Artificial Sequence
  Synthetically generated peptide
  VARIANT (1)..(17): Xaa = Any Amino Acid
ACEWXCANXXPXACTGC

SEQ ID NO: 12835 - protein, 17 aa, Artificial Sequence
  Synthetically generated peptide
  VARIANT (1)..(17): Xaa = Any Amino Acid
ACEWXCANXXPAXCTGC

SEQ ID NO: 12836 - protein, 17 aa, Artificial Sequence
  Synthetically generated peptide
  VARIANT (1)..(17): Xaa = Any Amino Acid
ACEWXCANXXPACXTGC

SEQ ID NO: 12837 - protein, 17 aa, Artificial Sequence
  Synthetically generated peptide
  VARIANT (1)..(17): Xaa = Any Amino Acid
ACEWXCANXXPACTXGC

SEQ ID NO: 12838 - protein, 17 aa, Artificial Sequence
  Synthetically generated peptide
  VARIANT (1)..(17): Xaa = Any Amino Acid
ACEWXCANXXPACTGXC

SEQ ID NO: 12839 - protein, 16 aa, Artificial Sequence
  Synthetically generated peptide
  VARIANT (1)..(16): Xaa = Any Amino Acid
ACEWXCANXPXACTGC

SEQ ID NO: 12840 - protein, 17 aa, Artificial Sequence
  Synthetically generated peptide
  VARIANT (1)..(17): Xaa = Any Amino Acid
ACEWXCANXPXXACTGC

SEQ ID NO: 12841 - protein, 17 aa, Artificial Sequence
  Synthetically generated peptide
  VARIANT (1)..(17): Xaa = Any Amino Acid
ACEWXCANXPXAXCTGC

SEQ ID NO: 12842 - protein, 17 aa, Artificial Sequence
  Synthetically generated peptide
  VARIANT (1)..(17): Xaa = Any Amino Acid
ACEWXCANXPXACXTGC

SEQ ID NO: 12843 - protein, 17 aa, Artificial Sequence
  Synthetically generated peptide
  VARIANT (1)..(17): Xaa = Any Amino Acid
ACEWXCANXPXACTXGC

SEQ ID NO: 12844 - protein, 17 aa, Artificial Sequence
  Synthetically generated peptide
  VARIANT (1)..(17): Xaa = Any Amino Acid
ACEWXCANXPXACTGXC

SEQ ID NO: 12845 - protein, 16 aa, Artificial Sequence
  Synthetically generated peptide
  VARIANT (1)..(16): Xaa = Any Amino Acid
ACEWXCANXPAXCTGC

SEQ ID NO: 12846 - protein, 17 aa, Artificial Sequence
  Synthetically generated peptide
  VARIANT (1)..(17): Xaa = Any Amino Acid
ACEWXCANXPAXXCTGC

SEQ ID NO: 12847 - protein, 17 aa, Artificial Sequence
  Synthetically generated peptide
  VARIANT (1)..(17): Xaa = Any Amino Acid
ACEWXCANXPAXCXTGC

SEQ ID NO: 12848 - protein, 17 aa, Artificial Sequence
  Synthetically generated peptide
  VARIANT (1)..(17): Xaa = Any Amino Acid
ACEWXCANXPAXCTXGC

SEQ ID NO: 12849 - protein, 17 aa, Artificial Sequence
  Synthetically generated peptide
  VARIANT (1)..(17): Xaa = Any Amino Acid
ACEWXCANXPAXCTGXC

SEQ ID NO: 12850 - protein, 16 aa, Artificial Sequence
  Synthetically generated peptide
  VARIANT (1)..(16): Xaa = Any Amino Acid
ACEWXCANXPACXTGC

SEQ ID NO: 12851 - protein, 17 aa, Artificial Sequence
  Synthetically generated peptide
  VARIANT (1)..(17): Xaa = Any Amino Acid
ACEWXCANXPACXXTGC

SEQ ID NO: 12852 - protein, 17 aa, Artificial Sequence
  Synthetically generated peptide
  VARIANT (1)..(17): Xaa = Any Amino Acid
ACEWXCANXPACXTXGC

SEQ ID NO: 12853 - protein, 17 aa, Artificial Sequence
  Synthetically generated peptide
  VARIANT (1)..(17): Xaa = Any Amino Acid
ACEWXCANXPACXTGXC

SEQ ID NO: 12854 - protein, 16 aa, Artificial Sequence
  Synthetically generated peptide
  VARIANT (1)..(16): Xaa = Any Amino Acid
ACEWXCANXPACTXGC

SEQ ID NO: 12855 - protein, 17 aa, Artificial Sequence
  Synthetically generated peptide
  VARIANT (1)..(17): Xaa = Any Amino Acid
ACEWXCANXPACTXXGC

SEQ ID NO: 12856 - protein, 17 aa, Artificial Sequence
  Synthetically generated peptide
  VARIANT (1)..(17): Xaa = Any Amino Acid
ACEWXCANXPACTXGXC

SEQ ID NO: 12857 - protein, 16 aa, Artificial Sequence
  Synthetically generated peptide
  VARIANT (1)..(16): Xaa = Any Amino Acid
ACEWXCANXPACTGXC

SEQ ID NO: 12858 - protein, 17 aa, Artificial Sequence
  Synthetically generated peptide
  VARIANT (1)..(17): Xaa = Any Amino Acid
ACEWXCANXPACTGXXC

SEQ ID NO: 12859 - protein, 15 aa, Artificial Sequence
  Synthetically generated peptide
  VARIANT (1)..(15): Xaa = Any Amino Acid
ACEWXCANPXACTGC

SEQ ID NO: 12860 - protein, 16 aa, Artificial Sequence
  Synthetically generated peptide
  VARIANT (1)..(16): Xaa = Any Amino Acid
ACEWXCANPXXACTGC

SEQ ID NO: 12861 - protein, 17 aa, Artificial Sequence
  Synthetically generated peptide
  VARIANT (1)..(17): Xaa = Any Amino Acid
ACEWXCANPXXXACTGC

SEQ ID NO: 12862 - protein, 17 aa, Artificial Sequence
  Synthetically generated peptide
  VARIANT (1)..(17): Xaa = Any Amino Acid
ACEWXCANPXXAXCTGC

SEQ ID NO: 12863 - protein, 17 aa, Artificial Sequence
  Synthetically generated peptide
  VARIANT (1)..(17): Xaa = Any Amino Acid
ACEWXCANPXXACXTGC

SEQ ID NO: 12864 - protein, 17 aa, Artificial Sequence
  Synthetically generated peptide
  VARIANT (1)..(17): Xaa = Any Amino Acid
ACEWXCANPXXACTXGC

SEQ ID NO: 12865 - protein, 17 aa, Artificial Sequence
  Synthetically generated peptide
  VARIANT (1)..(17): Xaa = Any Amino Acid
ACEWXCANPXXACTGXC

SEQ ID NO: 12866 - protein, 16 aa, Artificial Sequence
  Synthetically generated peptide
  VARIANT (1)..(16): Xaa = Any Amino Acid
ACEWXCANPXAXCTGC

SEQ ID NO: 12867 - protein, 17 aa, Artificial Sequence
  Synthetically generated peptide
  VARIANT (1)..(17): Xaa = Any Amino Acid
ACEWXCANPXAXXCTGC

SEQ ID NO: 12868 - protein, 17 aa, Artificial Sequence
  Synthetically generated peptide
  VARIANT (1)..(17): Xaa = Any Amino Acid
ACEWXCANPXAXCXTGC

SEQ ID NO: 12869 - protein, 17 aa, Artificial Sequence
  Synthetically generated peptide
  VARIANT (1)..(17): Xaa = Any Amino Acid
ACEWXCANPXAXCTXGC

SEQ ID NO: 12870 - protein, 17 aa, Artificial Sequence
  Synthetically generated peptide
  VARIANT (1)..(17): Xaa = Any Amino Acid
ACEWXCANPXAXCTGXC

SEQ ID NO: 12871 - protein, 16 aa, Artificial Sequence
  Synthetically generated peptide
  VARIANT (1)..(16): Xaa = Any Amino Acid
ACEWXCANPXACXTGC

SEQ ID NO: 12872 - protein, 17 aa, Artificial Sequence
  Synthetically generated peptide
  VARIANT (1)..(17): Xaa = Any Amino Acid
ACEWXCANPXACXXTGC

SEQ ID NO: 12873 - protein, 17 aa, Artificial Sequence
  Synthetically generated peptide
  VARIANT (1)..(17): Xaa = Any Amino Acid
ACEWXCANPXACXTXGC

SEQ ID NO: 12874 - protein, 17 aa, Artificial Sequence
  Synthetically generated peptide
  VARIANT (1)..(17): Xaa = Any Amino Acid
ACEWXCANPXACXTGXC

SEQ ID NO: 12875 - protein, 16 aa, Artificial Sequence
  Synthetically generated peptide
  VARIANT (1)..(16): Xaa = Any Amino Acid
ACEWXCANPXACTXGC

SEQ ID NO: 12876 - protein, 17 aa, Artificial Sequence
  Synthetically generated peptide
  VARIANT (1)..(17): Xaa = Any Amino Acid
ACEWXCANPXACTXXGC

SEQ ID NO: 12877 - protein, 17 aa, Artificial Sequence
  Synthetically generated peptide
  VARIANT (1)..(17): Xaa = Any Amino Acid
ACEWXCANPXACTXGXC

SEQ ID NO: 12878 - protein, 16 aa, Artificial Sequence
  Synthetically generated peptide
  VARIANT (1)..(16): Xaa = Any Amino Acid
ACEWXCANPXACTGXC

SEQ ID NO: 12879 - protein, 17 aa, Artificial Sequence
  Synthetically generated peptide
  VARIANT (1)..(17): Xaa = Any Amino Acid
ACEWXCANPXACTGXXC

SEQ ID NO: 12880 - protein, 15 aa, Artificial Sequence
  Synthetically generated peptide
  VARIANT (1)..(15): Xaa = Any Amino Acid
ACEWXCANPAXCTGC

SEQ ID NO: 12881 - protein, 16 aa, Artificial Sequence
  Synthetically generated peptide
  VARIANT (1)..(16): Xaa = Any Amino Acid
ACEWXCANPAXXCTGC

SEQ ID NO: 12882 - protein, 17 aa, Artificial Sequence
  Synthetically generated peptide
  VARIANT (1)..(17): Xaa = Any Amino Acid
ACEWXCANPAXXXCTGC

SEQ ID NO: 12883 - protein, 17 aa, Artificial Sequence
  Synthetically generated peptide
  VARIANT (1)..(17): Xaa = Any Amino Acid
ACEWXCANPAXXCXTGC

SEQ ID NO: 12884 - protein, 17 aa, Artificial Sequence
  Synthetically generated peptide
  VARIANT (1)..(17): Xaa = Any Amino Acid
ACEWXCANPAXXCTXGC

SEQ ID NO: 12885 - protein, 17 aa, Artificial Sequence
  Synthetically generated peptide
  VARIANT (1)..(17): Xaa = Any Amino Acid
ACEWXCANPAXXCTGXC

SEQ ID NO: 12886 - protein, 16 aa, Artificial Sequence
  Synthetically generated peptide
  VARIANT (1)..(16): Xaa = Any Amino Acid
ACEWXCANPAXCXTGC

SEQ ID NO: 12887 - protein, 17 aa, Artificial Sequence
  Synthetically generated peptide
  VARIANT (1)..(17): Xaa = Any Amino Acid
ACEWXCANPAXCXXTGC

SEQ ID NO: 12888 - protein, 17 aa, Artificial Sequence
  Synthetically generated peptide
  VARIANT (1)..(17): Xaa = Any Amino Acid
ACEWXCANPAXCXTXGC

SEQ ID NO: 12889 - protein, 17 aa, Artificial Sequence
  Synthetically generated peptide
  VARIANT (1)..(17): Xaa = Any Amino Acid
ACEWXCANPAXCXTGXC

SEQ ID NO: 12890 - protein, 16 aa, Artificial Sequence
  Synthetically generated peptide
  VARIANT (1)..(16): Xaa = Any Amino Acid
ACEWXCANPAXCTXGC

SEQ ID NO: 12891 - protein, 17 aa, Artificial Sequence
  Synthetically generated peptide
  VARIANT (1)..(17): Xaa = Any Amino Acid
ACEWXCANPAXCTXXGC

SEQ ID NO: 12892 - protein, 17 aa, Artificial Sequence
  Synthetically generated peptide
  VARIANT (1)..(17): Xaa = Any Amino Acid
ACEWXCANPAXCTXGXC

SEQ ID NO: 12893 - protein, 16 aa, Artificial Sequence
  Synthetically generated peptide
  VARIANT (1)..(16): Xaa = Any Amino Acid
ACEWXCANPAXCTGXC

SEQ ID NO: 12894 - protein, 17 aa, Artificial Sequence
  Synthetically generated peptide
  VARIANT (1)..(17): Xaa = Any Amino Acid
ACEWXCANPAXCTGXXC

SEQ ID NO: 12895 - protein, 15 aa, Artificial Sequence
  Synthetically generated peptide
  VARIANT (1)..(15): Xaa = Any Amino Acid
ACEWXCANPACXTGC

SEQ ID NO: 12896 - protein, 16 aa, Artificial Sequence
  Synthetically generated peptide
  VARIANT (1)..(16): Xaa = Any Amino Acid
ACEWXCANPACXXTGC

SEQ ID NO: 12897 - protein, 17 aa, Artificial Sequence
  Synthetically generated peptide
  VARIANT (1)..(17): Xaa = Any Amino Acid
ACEWXCANPACXXXTGC

SEQ ID NO: 12898 - protein, 17 aa, Artificial Sequence
  Synthetically generated peptide
  VARIANT (1)..(17): Xaa = Any Amino Acid
ACEWXCANPACXXTXGC

SEQ ID NO: 12899 - protein, 17 aa, Artificial Sequence
  Synthetically generated peptide
  VARIANT (1)..(17): Xaa = Any Amino Acid
ACEWXCANPACXXTGXC

SEQ ID NO: 12900 - protein, 16 aa, Artificial Sequence
  Synthetically generated peptide
  VARIANT (1)..(16): Xaa = Any Amino Acid
ACEWXCANPACXTXGC

SEQ ID NO: 12901 - protein, 17 aa, Artificial Sequence
  Synthetically generated peptide
  VARIANT (1)..(17): Xaa = Any Amino Acid
ACEWXCANPACXTXXGC

SEQ ID NO: 12902 - protein, 17 aa, Artificial Sequence
  Synthetically generated peptide
  VARIANT (1)..(17): Xaa = Any Amino Acid
ACEWXCANPACXTXGXC

SEQ ID NO: 12903 - protein, 16 aa, Artificial Sequence
  Synthetically generated peptide
  VARIANT (1)..(16): Xaa = Any Amino Acid
ACEWXCANPACXTGXC

SEQ ID NO: 12904 - protein, 17 aa, Artificial Sequence
  Synthetically generated peptide
  VARIANT (1)..(17): Xaa = Any Amino Acid
ACEWXCANPACXTGXXC

SEQ ID NO: 12905 - protein, 15 aa, Artificial Sequence
  Synthetically generated peptide
  VARIANT (1)..(15): Xaa = Any Amino Acid
ACEWXCANPACTXGC

SEQ ID NO: 12906 - protein, 16 aa, Artificial Sequence
  Synthetically generated peptide
  VARIANT (1)..(16): Xaa = Any Amino Acid
ACEWXCANPACTXXGC

SEQ ID NO: 12907 - protein, 17 aa, Artificial Sequence
  Synthetically generated peptide
  VARIANT (1)..(17): Xaa = Any Amino Acid
ACEWXCANPACTXXXGC

SEQ ID NO: 12908 - protein, 17 aa, Artificial Sequence
  Synthetically generated peptide
  VARIANT (1)..(17): Xaa = Any Amino Acid
ACEWXCANPACTXXGXC

SEQ ID NO: 12909 - protein, 16 aa, Artificial Sequence
  Synthetically generated peptide
  VARIANT (1)..(16): Xaa = Any Amino Acid
ACEWXCANPACTXGXC

SEQ ID NO: 12910 - protein, 17 aa, Artificial Sequence
  Synthetically generated peptide
  VARIANT (1)..(17): Xaa = Any Amino Acid
ACEWXCANPACTXGXXC

SEQ ID NO: 12911 - protein, 15 aa, Artificial Sequence
  Synthetically generated peptide
  VARIANT (1)..(15): Xaa = Any Amino Acid
ACEWXCANPACTGXC

SEQ ID NO: 12912 - protein, 16 aa, Artificial Sequence
  Synthetically generated peptide
  VARIANT (1)..(16): Xaa = Any Amino Acid
ACEWXCANPACTGXXC

SEQ ID NO: 12913 - protein, 17 aa, Artificial Sequence
  Synthetically generated peptide
  VARIANT (1)..(17): Xaa = Any Amino Acid
ACEWXCANPACTGXXXC

SEQ ID NO: 12914 - protein, 14 aa, Artificial Sequence
  Synthetically generated peptide
  VARIANT (1)..(14): Xaa = Any Amino Acid
ACEWCAXNPACTGC

SEQ ID NO: 12915 - protein, 15 aa, Artificial Sequence
  Synthetically generated peptide
  VARIANT (1)..(15): Xaa = Any Amino Acid
ACEWCAXXNPACTGC

SEQ ID NO: 12916 - protein, 16 aa, Artificial Sequence
  Synthetically generated peptide
  VARIANT (1)..(16): Xaa = Any Amino Acid
ACEWCAXXXNPACTGC

SEQ ID NO: 12917 - protein, 17 aa, Artificial Sequence
  Synthetically generated peptide
  VARIANT (1)..(17): Xaa = Any Amino Acid
ACEWCAXXXXNPACTGC

SEQ ID NO: 12918 - protein, 17 aa, Artificial Sequence
  Synthetically generated peptide
  VARIANT (1)..(17): Xaa = Any Amino Acid
ACEWCAXXXNXPACTGC

SEQ ID NO: 12919 - protein, 17 aa, Artificial Sequence
  Synthetically generated peptide
  VARIANT (1)..(17): Xaa = Any Amino Acid
ACEWCAXXXNPXACTGC

SEQ ID NO: 12920 - protein, 17 aa, Artificial Sequence
  Synthetically generated peptide
  VARIANT (1)..(17): Xaa = Any Amino Acid
ACEWCAXXXNPAXCTGC

SEQ ID NO: 12921 - protein, 17 aa, Artificial Sequence
  Synthetically generated peptide
  VARIANT (1)..(17): Xaa = Any Amino Acid
ACEWCAXXXNPACXTGC

SEQ ID NO: 12922 - protein, 17 aa, Artificial Sequence
  Synthetically generated peptide
  VARIANT (1)..(17): Xaa = Any Amino Acid
ACEWCAXXXNPACTXGC

SEQ ID NO: 12923 - protein, 17 aa, Artificial Sequence
  Synthetically generated peptide
  VARIANT (1)..(17): Xaa = Any Amino Acid
ACEWCAXXXNPACTGXC

SEQ ID NO: 12924 - protein, 16 aa, Artificial Sequence
  Synthetically generated peptide
  VARIANT (1)..(16): Xaa = Any Amino Acid
ACEWCAXXNXPACTGC

SEQ ID NO: 12925 - protein, 17 aa, Artificial Sequence
  Synthetically generated peptide
  VARIANT (1)..(17): Xaa = Any Amino Acid
ACEWCAXXNXXPACTGC

SEQ ID NO: 12926 - protein, 17 aa, Artificial Sequence
  Synthetically generated peptide
  VARIANT (1)..(17): Xaa = Any Amino Acid
ACEWCAXXNXPXACTGC

SEQ ID NO: 12927 - protein, 17 aa, Artificial Sequence
  Synthetically generated peptide
  VARIANT (1)..(17): Xaa = Any Amino Acid
ACEWCAXXNXPAXCTGC

SEQ ID NO: 12928 - protein, 17 aa, Artificial Sequence
  Synthetically generated peptide
  VARIANT (1)..(17): Xaa = Any Amino Acid
ACEWCAXXNXPACXTGC

SEQ ID NO: 12929 - protein, 17 aa, Artificial Sequence
  Synthetically generated peptide
  VARIANT (1)..(17): Xaa = Any Amino Acid
ACEWCAXXNXPACTXGC

SEQ ID NO: 12930 - protein, 17 aa, Artificial Sequence
  Synthetically generated peptide
  VARIANT (1)..(17): Xaa = Any Amino Acid
ACEWCAXXNXPACTGXC

SEQ ID NO: 12931 - protein, 16 aa, Artificial Sequence
  Synthetically generated peptide
  VARIANT (1)..(16): Xaa = Any Amino Acid
ACEWCAXXNPXACTGC

SEQ ID NO: 12932 - protein, 17 aa, Artificial Sequence
  Synthetically generated peptide
  VARIANT (1)..(17): Xaa = Any Amino Acid
ACEWCAXXNPXXACTGC

SEQ ID NO: 12933 - protein, 17 aa, Artificial Sequence
  Synthetically generated peptide
  VARIANT (1)..(17): Xaa = Any Amino Acid
ACEWCAXXNPXAXCTGC

SEQ ID NO: 12934 - protein, 17 aa, Artificial Sequence
  Synthetically generated peptide
  VARIANT (1)..(17): Xaa = Any Amino Acid
ACEWCAXXNPXACXTGC

SEQ ID NO: 12935 - protein, 17 aa, Artificial Sequence
  Synthetically generated peptide
  VARIANT (1)..(17): Xaa = Any Amino Acid
ACEWCAXXNPXACTXGC

SEQ ID NO: 12936 - protein, 17 aa, Artificial Sequence
  Synthetically generated peptide
  VARIANT (1)..(17): Xaa = Any Amino Acid
ACEWCAXXNPXACTGXC

SEQ ID NO: 12937 - protein, 16 aa, Artificial Sequence
  Synthetically generated peptide
  VARIANT (1)..(16): Xaa = Any Amino Acid
ACEWCAXXNPAXCTGC

SEQ ID NO: 12938 - protein, 17 aa, Artificial Sequence
  Synthetically generated peptide
  VARIANT (1)..(17): Xaa = Any Amino Acid
ACEWCAXXNPAXXCTGC

SEQ ID NO: 12939 - protein, 17 aa, Artificial Sequence
  Synthetically generated peptide
  VARIANT (1)..(17): Xaa = Any Amino Acid
ACEWCAXXNPAXCXTGC

SEQ ID NO: 12940 - protein, 17 aa, Artificial Sequence
  Synthetically generated peptide
  VARIANT (1)..(17): Xaa = Any Amino Acid
ACEWCAXXNPAXCTXGC

SEQ ID NO: 12941 - protein, 17 aa, Artificial Sequence
  Synthetically generated peptide
  VARIANT (1)..(17): Xaa = Any Amino Acid
ACEWCAXXNPAXCTGXC

SEQ ID NO: 12942 - protein, 16 aa, Artificial Sequence
  Synthetically generated peptide
  VARIANT (1)..(16): Xaa = Any Amino Acid
ACEWCAXXNPACXTGC

SEQ ID NO: 12943 - protein, 17 aa, Artificial Sequence
  Synthetically generated peptide
  VARIANT (1)..(17): Xaa = Any Amino Acid
ACEWCAXXNPACXXTGC

SEQ ID NO: 12944 - protein, 17 aa, Artificial Sequence
  Synthetically generated peptide
  VARIANT (1)..(17): Xaa = Any Amino Acid
ACEWCAXXNPACXTXGC

SEQ ID NO: 12945 - protein, 17 aa, Artificial Sequence
  Synthetically generated peptide
  VARIANT (1)..(17): Xaa = Any Amino Acid
ACEWCAXXNPACXTGXC

SEQ ID NO: 12946 - protein, 16 aa, Artificial Sequence
  Synthetically generated peptide
  VARIANT (1)..(16): Xaa = Any Amino Acid
ACEWCAXXNPACTXGC

SEQ ID NO: 12947 - protein, 17 aa, Artificial Sequence
  Synthetically generated peptide
  VARIANT (1)..(17): Xaa = Any Amino Acid
ACEWCAXXNPACTXXGC

SEQ ID NO: 12948 - protein, 17 aa, Artificial Sequence
  Synthetically generated peptide
  VARIANT (1)..(17): Xaa = Any Amino Acid
ACEWCAXXNPACTXGXC

SEQ ID NO: 12949 - protein, 16 aa, Artificial Sequence
  Synthetically generated peptide
  VARIANT (1)..(16): Xaa = Any Amino Acid
ACEWCAXXNPACTGXC

SEQ ID NO: 12950 - protein, 17 aa, Artificial Sequence
  Synthetically generated peptide
  VARIANT (1)..(17): Xaa = Any Amino Acid
ACEWCAXXNPACTGXXC

SEQ ID NO: 12951 - protein, 15 aa, Artificial Sequence
  Synthetically generated peptide
  VARIANT (1)..(15): Xaa = Any Amino Acid
ACEWCAXNXPACTGC

SEQ ID NO: 12952 - protein, 16 aa, Artificial Sequence
  Synthetically generated peptide
  VARIANT (1)..(16): Xaa = Any Amino Acid
ACEWCAXNXXPACTGC

SEQ ID NO: 12953 - protein, 17 aa, Artificial Sequence
  Synthetically generated peptide
  VARIANT (1)..(17): Xaa = Any Amino Acid
ACEWCAXNXXXPACTGC

SEQ ID NO: 12954 - protein, 17 aa, Artificial Sequence
  Synthetically generated peptide
  VARIANT (1)..(17): Xaa = Any Amino Acid
ACEWCAXNXXPXACTGC

SEQ ID NO: 12955 - protein, 17 aa, Artificial Sequence
  Synthetically generated peptide
  VARIANT (1)..(17): Xaa = Any Amino Acid
ACEWCAXNXXPAXCTGC

SEQ ID NO: 12956 - protein, 17 aa, Artificial Sequence
  Synthetically generated peptide
  VARIANT (1)..(17): Xaa = Any Amino Acid
ACEWCAXNXXPACXTGC

SEQ ID NO: 12957 - protein, 17 aa, Artificial Sequence
  Synthetically generated peptide
  VARIANT (1)..(17): Xaa = Any Amino Acid
ACEWCAXNXXPACTXGC

SEQ ID NO: 12958 - protein, 17 aa, Artificial Sequence
  Synthetically generated peptide
  VARIANT (1)..(17): Xaa = Any Amino Acid
ACEWCAXNXXPACTGXC

SEQ ID NO: 12959 - protein, 16 aa, Artificial Sequence
  Synthetically generated peptide
  VARIANT (1)..(16): Xaa = Any Amino Acid
ACEWCAXNXPXACTGC

SEQ ID NO: 12960 - protein, 17 aa, Artificial Sequence
  Synthetically generated peptide
  VARIANT (1)..(17): Xaa = Any Amino Acid
ACEWCAXNXPXXACTGC

SEQ ID NO: 12961 - protein, 17 aa, Artificial Sequence
  Synthetically generated peptide
  VARIANT (1)..(17): Xaa = Any Amino Acid
ACEWCAXNXPXAXCTGC

SEQ ID NO: 12962 - protein, 17 aa, Artificial Sequence
  Synthetically generated peptide
  VARIANT (1)..(17): Xaa = Any Amino Acid
ACEWCAXNXPXACXTGC

SEQ ID NO: 12963 - protein, 17 aa, Artificial Sequence
  Synthetically generated peptide
  VARIANT (1)..(17): Xaa = Any Amino Acid
ACEWCAXNXPXACTXGC

SEQ ID NO: 12964 - protein, 17 aa, Artificial Sequence
  Synthetically generated peptide
  VARIANT (1)..(17): Xaa = Any Amino Acid
ACEWCAXNXPXACTGXC

SEQ ID NO: 12965 - protein, 16 aa, Artificial Sequence
  Synthetically generated peptide
  VARIANT (1)..(16): Xaa = Any Amino Acid
ACEWCAXNXPAXCTGC

SEQ ID NO: 12966 - protein, 17 aa, Artificial Sequence
  Synthetically generated peptide
  VARIANT (1)..(17): Xaa = Any Amino Acid
ACEWCAXNXPAXXCTGC

SEQ ID NO: 12967 - protein, 17 aa, Artificial Sequence
  Synthetically generated peptide
  VARIANT (1)..(17): Xaa = Any Amino Acid
ACEWCAXNXPAXCXTGC

SEQ ID NO: 12968 - protein, 17 aa, Artificial Sequence
  Synthetically generated peptide
  VARIANT (1)..(17): Xaa = Any Amino Acid
ACEWCAXNXPAXCTXGC

SEQ ID NO: 12969 - protein, 17 aa, Artificial Sequence
  Synthetically generated peptide
  VARIANT (1)..(17): Xaa = Any Amino Acid
ACEWCAXNXPAXCTGXC

SEQ ID NO: 12970 - protein, 16 aa, Artificial Sequence
  Synthetically generated peptide
  VARIANT (1)..(16): Xaa = Any Amino Acid
ACEWCAXNXPACXTGC

SEQ ID NO: 12971 - protein, 17 aa, Artificial Sequence
  Synthetically generated peptide
  VARIANT (1)..(17): Xaa = Any Amino Acid
ACEWCAXNXPACXXTGC

SEQ ID NO: 12972 - protein, 17 aa, Artificial Sequence
  Synthetically generated peptide
  VARIANT (1)..(17): Xaa = Any Amino Acid
ACEWCAXNXPACXTXGC

SEQ ID NO: 12973 - protein, 17 aa, Artificial Sequence
  Synthetically generated peptide
  VARIANT (1)..(17): Xaa = Any Amino Acid
ACEWCAXNXPACXTGXC

SEQ ID NO: 12974 - protein, 16 aa, Artificial Sequence
  Synthetically generated peptide
  VARIANT (1)..(16): Xaa = Any Amino Acid
ACEWCAXNXPACTXGC

SEQ ID NO: 12975 - protein, 17 aa, Artificial Sequence
  Synthetically generated peptide
  VARIANT (1)..(17): Xaa = Any Amino Acid
ACEWCAXNXPACTXXGC

SEQ ID NO: 12976 - protein, 17 aa, Artificial Sequence
  Synthetically generated peptide
  VARIANT (1)..(17): Xaa = Any Amino Acid
ACEWCAXNXPACTXGXC

SEQ ID NO: 12977 - protein, 16 aa, Artificial Sequence
  Synthetically generated peptide
  VARIANT (1)..(16): Xaa = Any Amino Acid
ACEWCAXNXPACTGXC

SEQ ID NO: 12978 - protein, 17 aa, Artificial Sequence
  Synthetically generated peptide
  VARIANT (1)..(17): Xaa = Any Amino Acid
ACEWCAXNXPACTGXXC

SEQ ID NO: 12979 - protein, 15 aa, Artificial Sequence
  Synthetically generated peptide
  VARIANT (1)..(15): Xaa = Any Amino Acid
ACEWCAXNPXACTGC

SEQ ID NO: 12980 - protein, 16 aa, Artificial Sequence
  Synthetically generated peptide
  VARIANT (1)..(16): Xaa = Any Amino Acid
ACEWCAXNPXXACTGC

SEQ ID NO: 12981 - protein, 17 aa, Artificial Sequence
  Synthetically generated peptide
  VARIANT (1)..(17): Xaa = Any Amino Acid
ACEWCAXNPXXXACTGC

SEQ ID NO: 12982 - protein, 17 aa, Artificial Sequence
  Synthetically generated peptide
  VARIANT (1)..(17): Xaa = Any Amino Acid
ACEWCAXNPXXAXCTGC

SEQ ID NO: 12983 - protein, 17 aa, Artificial Sequence
  Synthetically generated peptide
  VARIANT (1)..(17): Xaa = Any Amino Acid
ACEWCAXNPXXACXTGC

SEQ ID NO: 12984 - protein, 17 aa, Artificial Sequence
  Synthetically generated peptide
  VARIANT (1)..(17): Xaa = Any Amino Acid
ACEWCAXNPXXACTXGC

SEQ ID NO: 12985 - protein, 17 aa, Artificial Sequence
  Synthetically generated peptide
  VARIANT (1)..(17): Xaa = Any Amino Acid
ACEWCAXNPXXACTGXC

SEQ ID NO: 12986 - protein, 16 aa, Artificial Sequence
  Synthetically generated peptide
  VARIANT (1)..(16): Xaa = Any Amino Acid
ACEWCAXNPXAXCTGC

SEQ ID NO: 12987 - protein, 17 aa, Artificial Sequence
  Synthetically generated peptide
  VARIANT (1)..(17): Xaa = Any Amino Acid
ACEWCAXNPXAXXCTGC

SEQ ID NO: 12988 - protein, 17 aa, Artificial Sequence
  Synthetically generated peptide
  VARIANT (1)..(17): Xaa = Any Amino Acid
ACEWCAXNPXAXCXTGC

SEQ ID NO: 12989 - protein, 17 aa, Artificial Sequence
  Synthetically generated peptide
  VARIANT (1)..(17): Xaa = Any Amino Acid
ACEWCAXNPXAXCTXGC

SEQ ID NO: 12990 - protein, 17 aa, Artificial Sequence
  Synthetically generated peptide
  VARIANT (1)..(17): Xaa = Any Amino Acid
ACEWCAXNPXAXCTGXC

SEQ ID NO: 12991 - protein, 16 aa, Artificial Sequence
  Synthetically generated peptide
  VARIANT (1)..(16): Xaa = Any Amino Acid
ACEWCAXNPXACXTGC

SEQ ID NO: 12992 - protein, 17 aa, Artificial Sequence
  Synthetically generated peptide
  VARIANT (1)..(17): Xaa = Any Amino Acid
ACEWCAXNPXACXXTGC

SEQ ID NO: 12993 - protein, 17 aa, Artificial Sequence
  Synthetically generated peptide
  VARIANT (1)..(17): Xaa = Any Amino Acid
ACEWCAXNPXACXTXGC

SEQ ID NO: 12994 - protein, 17 aa, Artificial Sequence
  Synthetically generated peptide
  VARIANT (1)..(17): Xaa = Any Amino Acid
ACEWCAXNPXACXTGXC

SEQ ID NO: 12995 - protein, 16 aa, Artificial Sequence
  Synthetically generated peptide
  VARIANT (1)..(16): Xaa = Any Amino Acid
ACEWCAXNPXACTXGC

SEQ ID NO: 12996 - protein, 17 aa, Artificial Sequence
  Synthetically generated peptide
  VARIANT (1)..(17): Xaa = Any Amino Acid
ACEWCAXNPXACTXXGC

SEQ ID NO: 12997 - protein, 17 aa, Artificial Sequence
  Synthetically generated peptide
  VARIANT (1)..(17): Xaa = Any Amino Acid
ACEWCAXNPXACTXGXC

SEQ ID NO: 12998 - protein, 16 aa, Artificial Sequence
  Synthetically generated peptide
  VARIANT (1)..(16): Xaa = Any Amino Acid
ACEWCAXNPXACTGXC

SEQ ID NO: 12999 - protein, 17 aa, Artificial Sequence
  Synthetically generated peptide
  VARIANT (1)..(17): Xaa = Any Amino Acid
ACEWCAXNPXACTGXXC

SEQ ID NO: 13000 - protein, 15 aa, Artificial Sequence
  Synthetically generated peptide
  VARIANT (1)..(15): Xaa = Any Amino Acid
ACEWCAXNPAXCTGC

SEQ ID NO: 13001 - protein, 16 aa, Artificial Sequence
  Synthetically generated peptide
  VARIANT (1)..(16): Xaa = Any Amino Acid
ACEWCAXNPAXXCTGC

SEQ ID NO: 13002 - protein, 17 aa, Artificial Sequence
  Synthetically generated peptide
  VARIANT (1)..(17): Xaa = Any Amino Acid
ACEWCAXNPAXXXCTGC

SEQ ID NO: 13003 - protein, 17 aa, Artificial Sequence
  Synthetically generated peptide
  VARIANT (1)..(17): Xaa = Any Amino Acid
ACEWCAXNPAXXCXTGC

SEQ ID NO: 13004 - protein, 17 aa, Artificial Sequence
  Synthetically generated peptide
  VARIANT (1)..(17): Xaa = Any Amino Acid
ACEWCAXNPAXXCTXGC

SEQ ID NO: 13005 - protein, 17 aa, Artificial Sequence
  Synthetically generated peptide
  VARIANT (1)..(17): Xaa = Any Amino Acid
ACEWCAXNPAXXCTGXC

SEQ ID NO: 13006 - protein, 16 aa, Artificial Sequence
  Synthetically generated peptide
  VARIANT (1)..(16): Xaa = Any Amino Acid
ACEWCAXNPAXCXTGC

SEQ ID NO: 13007 - protein, 17 aa, Artificial Sequence
  Synthetically generated peptide
  VARIANT (1)..(17): Xaa = Any Amino Acid
ACEWCAXNPAXCXXTGC

SEQ ID NO: 13008 - protein, 17 aa, Artificial Sequence
  Synthetically generated peptide
  VARIANT (1)..(17): Xaa = Any Amino Acid
ACEWCAXNPAXCXTXGC

SEQ ID NO: 13009 - protein, 17 aa, Artificial Sequence
  Synthetically generated peptide
  VARIANT (1)..(17): Xaa = Any Amino Acid
ACEWCAXNPAXCXTGXC

SEQ ID NO: 13010 - protein, 16 aa, Artificial Sequence
  Synthetically generated peptide
  VARIANT (1)..(16): Xaa = Any Amino Acid
ACEWCAXNPAXCTXGC

SEQ ID NO: 13011 - protein, 17 aa, Artificial Sequence
  Synthetically generated peptide
  VARIANT (1)..(17): Xaa = Any Amino Acid
ACEWCAXNPAXCTXXGC

SEQ ID NO: 13012 - protein, 17 aa, Artificial Sequence
  Synthetically generated peptide
  VARIANT (1)..(17): Xaa = Any Amino Acid
ACEWCAXNPAXCTXGXC

SEQ ID NO: 13013 - protein, 16 aa, Artificial Sequence
  Synthetically generated peptide
  VARIANT (1)..(16): Xaa = Any Amino Acid
ACEWCAXNPAXCTGXC

SEQ ID NO: 13014 - protein, 17 aa, Artificial Sequence
  Synthetically generated peptide
  VARIANT (1)..(17): Xaa = Any Amino Acid
ACEWCAXNPAXCTGXXC

SEQ ID NO: 13015 - protein, 15 aa, Artificial Sequence
  Synthetically generated peptide
  VARIANT (1)..(15): Xaa = Any Amino Acid
ACEWCAXNPACXTGC

SEQ ID NO: 13016 - protein, 16 aa, Artificial Sequence
  Synthetically generated peptide
  VARIANT (1)..(16): Xaa = Any Amino Acid
ACEWCAXNPACXXTGC

SEQ ID NO: 13017 - protein, 17 aa, Artificial Sequence
  Synthetically generated peptide
  VARIANT (1)..(17): Xaa = Any Amino Acid
ACEWCAXNPACXXXTGC

SEQ ID NO: 13018 - protein, 17 aa, Artificial Sequence
  Synthetically generated peptide
  VARIANT (1)..(17): Xaa = Any Amino Acid
ACEWCAXNPACXXTXGC

SEQ ID NO: 13019 - protein, 17 aa, Artificial Sequence
  Synthetically generated peptide
  VARIANT (1)..(17): Xaa = Any Amino Acid
ACEWCAXNPACXXTGXC

SEQ ID NO: 13020 - protein, 16 aa, Artificial Sequence
  Synthetically generated peptide
  VARIANT (1)..(16): Xaa = Any Amino Acid
ACEWCAXNPACXTXGC

SEQ ID NO: 13021 - protein, 17 aa, Artificial Sequence
  Synthetically generated peptide
  VARIANT (1)..(17): Xaa = Any Amino Acid
ACEWCAXNPACXTXXGC

SEQ ID NO: 13022 - protein, 17 aa, Artificial Sequence
  Synthetically generated peptide
  VARIANT (1)..(17): Xaa = Any Amino Acid
ACEWCAXNPACXTXGXC

SEQ ID NO: 13023 - protein, 16 aa, Artificial Sequence
  Synthetically generated peptide
  VARIANT (1)..(16): Xaa = Any Amino Acid
ACEWCAXNPACXTGXC

SEQ ID NO: 13024 - protein, 17 aa, Artificial Sequence
  Synthetically generated peptide
  VARIANT (1)..(17): Xaa = Any Amino Acid
ACEWCAXNPACXTGXXC

SEQ ID NO: 13025 - protein, 15 aa, Artificial Sequence
  Synthetically generated peptide
  VARIANT (1)..(15): Xaa = Any Amino Acid
ACEWCAXNPACTXGC

SEQ ID NO: 13026 - protein, 16 aa, Artificial Sequence
  Synthetically generated peptide
  VARIANT (1)..(16): Xaa = Any Amino Acid
ACEWCAXNPACTXXGC

SEQ ID NO: 13027 - protein, 17 aa, Artificial Sequence
  Synthetically generated peptide
  VARIANT (1)..(17): Xaa = Any Amino Acid
ACEWCAXNPACTXXXGC

SEQ ID NO: 13028 - protein, 17 aa, Artificial Sequence
  Synthetically generated peptide
  VARIANT (1)..(17): Xaa = Any Amino Acid
ACEWCAXNPACTXXGXC

SEQ ID NO: 13029 - protein, 16 aa, Artificial Sequence
  Synthetically generated peptide
  VARIANT (1)..(16): Xaa = Any Amino Acid
ACEWCAXNPACTXGXC

SEQ ID NO: 13030 - protein, 17 aa, Artificial Sequence
  Synthetically generated peptide
  VARIANT (1)..(17): Xaa = Any Amino Acid
ACEWCAXNPACTXGXXC

SEQ ID NO: 13031 - protein, 15 aa, Artificial Sequence
  Synthetically generated peptide
  VARIANT (1)..(15): Xaa = Any Amino Acid
ACEWCAXNPACTGXC

SEQ ID NO: 13032 - protein, 16 aa, Artificial Sequence
  Synthetically generated peptide
  VARIANT (1)..(16): Xaa = Any Amino Acid
ACEWCAXNPACTGXXC

SEQ ID NO: 13033 - protein, 17 aa, Artificial Sequence
  Synthetically generated peptide
  VARIANT (1)..(17): Xaa = Any Amino Acid
ACEWCAXNPACTGXXXC

SEQ ID NO: 13034 - protein, 14 aa, Artificial Sequence
  Synthetically generated peptide
  VARIANT (1)..(14): Xaa = Any Amino Acid
ACEWCANXPACTGC

SEQ ID NO: 13035 - protein, 15 aa, Artificial Sequence
  Synthetically generated peptide
  VARIANT (1)..(15): Xaa = Any Amino Acid
ACEWCANXXPACTGC

SEQ ID NO: 13036 - protein, 16 aa, Artificial Sequence
  Synthetically generated peptide
  VARIANT (1)..(16): Xaa = Any Amino Acid
ACEWCANXXXPACTGC

SEQ ID NO: 13037 - protein, 17 aa, Artificial Sequence
  Synthetically generated peptide
  VARIANT (1)..(17): Xaa = Any Amino Acid
ACEWCANXXXXPACTGC

SEQ ID NO: 13038 - protein, 17 aa, Artificial Sequence
  Synthetically generated peptide
  VARIANT (1)..(17): Xaa = Any Amino Acid
ACEWCANXXXPXACTGC

SEQ ID NO: 13039 - protein, 17 aa, Artificial Sequence
  Synthetically generated peptide
  VARIANT (1)..(17): Xaa = Any Amino Acid
ACEWCANXXXPAXCTGC

SEQ ID NO: 13040 - protein, 17 aa, Artificial Sequence
  Synthetically generated peptide
  VARIANT (1)..(17): Xaa = Any Amino Acid
ACEWCANXXXPACXTGC

SEQ ID NO: 13041 - protein, 17 aa, Artificial Sequence
  Synthetically generated peptide
  VARIANT (1)..(17): Xaa = Any Amino Acid
ACEWCANXXXPACTXGC

SEQ ID NO: 13042 - protein, 17 aa, Artificial Sequence
  Synthetically generated peptide
  VARIANT (1)..(17): Xaa = Any Amino Acid
ACEWCANXXXPACTGXC

SEQ ID NO: 13043 - protein, 16 aa, Artificial Sequence
  Synthetically generated peptide
  VARIANT (1)..(16): Xaa = Any Amino Acid
ACEWCANXXPXACTGC

SEQ ID NO: 13044 - protein, 17 aa, Artificial Sequence
  Synthetically generated peptide
  VARIANT (1)..(17): Xaa = Any Amino Acid
ACEWCANXXPXXACTGC

SEQ ID NO: 13045 - protein, 17 aa, Artificial Sequence
  Synthetically generated peptide
  VARIANT (1)..(17): Xaa = Any Amino Acid
ACEWCANXXPXAXCTGC

SEQ ID NO: 13046 - protein, 17 aa, Artificial Sequence
  Synthetically generated peptide
  VARIANT (1)..(17): Xaa = Any Amino Acid
ACEWCANXXPXACXTGC

SEQ ID NO: 13047 - protein, 17 aa, Artificial Sequence
  Synthetically generated peptide
  VARIANT (1)..(17): Xaa = Any Amino Acid
ACEWCANXXPXACTXGC

SEQ ID NO: 13048 - protein, 17 aa, Artificial Sequence
  Synthetically generated peptide
  VARIANT (1)..(17): Xaa = Any Amino Acid
ACEWCANXXPXACTGXC

SEQ ID NO: 13049 - protein, 16 aa, Artificial Sequence
  Synthetically generated peptide
  VARIANT (1)..(16): Xaa = Any Amino Acid
ACEWCANXXPAXCTGC

SEQ ID NO: 13050 - protein, 17 aa, Artificial Sequence
  Synthetically generated peptide
  VARIANT (1)..(17): Xaa = Any Amino Acid
ACEWCANXXPAXXCTGC

SEQ ID NO: 13051 - protein, 17 aa, Artificial Sequence
  Synthetically generated peptide
  VARIANT (1)..(17): Xaa = Any Amino Acid
ACEWCANXXPAXCXTGC

SEQ ID NO: 13052 - protein, 17 aa, Artificial Sequence
  Synthetically generated peptide
  VARIANT (1)..(17): Xaa = Any Amino Acid
ACEWCANXXPAXCTXGC

SEQ ID NO: 13053 - protein, 17 aa, Artificial Sequence
  Synthetically generated peptide
  VARIANT (1)..(17): Xaa = Any Amino Acid
ACEWCANXXPAXCTGXC

SEQ ID NO: 13054 - protein, 16 aa, Artificial Sequence
  Synthetically generated peptide
  VARIANT (1)..(16): Xaa = Any Amino Acid
ACEWCANXXPACXTGC

SEQ ID NO: 13055 - protein, 17 aa, Artificial Sequence
  Synthetically generated peptide
  VARIANT (1)..(17): Xaa = Any Amino Acid
ACEWCANXXPACXXTGC

SEQ ID NO: 13056 - protein, 17 aa, Artificial Sequence
  Synthetically generated peptide
  VARIANT (1)..(17): Xaa = Any Amino Acid
ACEWCANXXPACXTXGC

SEQ ID NO: 13057 - protein, 17 aa, Artificial Sequence
  Synthetically generated peptide
  VARIANT (1)..(17): Xaa = Any Amino Acid
ACEWCANXXPACXTGXC

SEQ ID NO: 13058 - protein, 16 aa, Artificial Sequence
  Synthetically generated peptide
  VARIANT (1)..(16): Xaa = Any Amino Acid
ACEWCANXXPACTXGC

SEQ ID NO: 13059 - protein, 17 aa, Artificial Sequence
  Synthetically generated peptide
  VARIANT (1)..(17): Xaa = Any Amino Acid
ACEWCANXXPACTXXGC

SEQ ID NO: 13060 - protein, 17 aa, Artificial Sequence
  Synthetically generated peptide
  VARIANT (1)..(17): Xaa = Any Amino Acid
ACEWCANXXPACTXGXC

SEQ ID NO: 13061 - protein, 16 aa, Artificial Sequence
  Synthetically generated peptide
  VARIANT (1)..(16): Xaa = Any Amino Acid
ACEWCANXXPACTGXC

SEQ ID NO: 13062 - protein, 17 aa, Artificial Sequence
  Synthetically generated peptide
  VARIANT (1)..(17): Xaa = Any Amino Acid
ACEWCANXXPACTGXXC

SEQ ID NO: 13063 - protein, 15 aa, Artificial Sequence
  Synthetically generated peptide
  VARIANT (1)..(15): Xaa = Any Amino Acid
ACEWCANXPXACTGC

SEQ ID NO: 13064 - protein, 16 aa, Artificial Sequence
  Synthetically generated peptide
  VARIANT (1)..(16): Xaa = Any Amino Acid
ACEWCANXPXXACTGC

SEQ ID NO: 13065 - protein, 17 aa, Artificial Sequence
  Synthetically generated peptide
  VARIANT (1)..(17): Xaa = Any Amino Acid
ACEWCANXPXXXACTGC

SEQ ID NO: 13066 - protein, 17 aa, Artificial Sequence
  Synthetically generated peptide
  VARIANT (1)..(17): Xaa = Any Amino Acid
ACEWCANXPXXAXCTGC

SEQ ID NO: 13067 - protein, 17 aa, Artificial Sequence
  Synthetically generated peptide
  VARIANT (1)..(17): Xaa = Any Amino Acid
ACEWCANXPXXACXTGC

SEQ ID NO: 13068 - protein, 17 aa, Artificial Sequence
  Synthetically generated peptide
  VARIANT (1)..(17): Xaa = Any Amino Acid
ACEWCANXPXXACTXGC

SEQ ID NO: 13069 - protein, 17 aa, Artificial Sequence
  Synthetically generated peptide
  VARIANT (1)..(17): Xaa = Any Amino Acid
ACEWCANXPXXACTGXC

SEQ ID NO: 13070 - protein, 16 aa, Artificial Sequence
  Synthetically generated peptide
  VARIANT (1)..(16): Xaa = Any Amino Acid
ACEWCANXPXAXCTGC

SEQ ID NO: 13071 - protein, 17 aa, Artificial Sequence
  Synthetically generated peptide
  VARIANT (1)..(17): Xaa = Any Amino Acid
ACEWCANXPXAXXCTGC

SEQ ID NO: 13072 - protein, 17 aa, Artificial Sequence
  Synthetically generated peptide
  VARIANT (1)..(17): Xaa = Any Amino Acid
ACEWCANXPXAXCXTGC

SEQ ID NO: 13073 - protein, 17 aa, Artificial Sequence
  Synthetically generated peptide
  VARIANT (1)..(17): Xaa = Any Amino Acid
ACEWCANXPXAXCTXGC

SEQ ID NO: 13074 - protein, 17 aa, Artificial Sequence
  Synthetically generated peptide
  VARIANT (1)..(17): Xaa = Any Amino Acid
ACEWCANXPXAXCTGXC

SEQ ID NO: 13075 - protein, 16 aa, Artificial Sequence
  Synthetically generated peptide
  VARIANT (1)..(16): Xaa = Any Amino Acid
ACEWCANXPXACXTGC

SEQ ID NO: 13076 - protein, 17 aa, Artificial Sequence
  Synthetically generated peptide
  VARIANT (1)..(17): Xaa = Any Amino Acid
ACEWCANXPXACXXTGC

SEQ ID NO: 13077 - protein, 17 aa, Artificial Sequence
  Synthetically generated peptide
  VARIANT (1)..(17): Xaa = Any Amino Acid
ACEWCANXPXACXTXGC

SEQ ID NO: 13078 - protein, 17 aa, Artificial Sequence
  Synthetically generated peptide
  VARIANT (1)..(17): Xaa = Any Amino Acid
ACEWCANXPXACXTGXC

SEQ ID NO: 13079 - protein, 16 aa, Artificial Sequence
  Synthetically generated peptide
  VARIANT (1)..(16): Xaa = Any Amino Acid
ACEWCANXPXACTXGC

SEQ ID NO: 13080 - protein, 17 aa, Artificial Sequence
  Synthetically generated peptide
  VARIANT (1)..(17): Xaa = Any Amino Acid
ACEWCANXPXACTXXGC

SEQ ID NO: 13081 - protein, 17 aa, Artificial Sequence
  Synthetically generated peptide
  VARIANT (1)..(17): Xaa = Any Amino Acid
ACEWCANXPXACTXGXC

SEQ ID NO: 13082 - protein, 16 aa, Artificial Sequence
  Synthetically generated peptide
  VARIANT (1)..(16): Xaa = Any Amino Acid
ACEWCANXPXACTGXC

SEQ ID NO: 13083 - protein, 17 aa, Artificial Sequence
  Synthetically generated peptide
  VARIANT (1)..(17): Xaa = Any Amino Acid
ACEWCANXPXACTGXXC

SEQ ID NO: 13084 - protein, 15 aa, Artificial Sequence
  Synthetically generated peptide
  VARIANT (1)..(15): Xaa = Any Amino Acid
ACEWCANXPAXCTGC

SEQ ID NO: 13085 - protein, 16 aa, Artificial Sequence
  Synthetically generated peptide
  VARIANT (1)..(16): Xaa = Any Amino Acid
ACEWCANXPAXXCTGC

SEQ ID NO: 13086 - protein, 17 aa, Artificial Sequence
  Synthetically generated peptide
  VARIANT (1)..(17): Xaa = Any Amino Acid
ACEWCANXPAXXXCTGC

SEQ ID NO: 13087 - protein, 17 aa, Artificial Sequence
  Synthetically generated peptide
  VARIANT (1)..(17): Xaa = Any Amino Acid
ACEWCANXPAXXCXTGC

SEQ ID NO: 13088 - protein, 17 aa, Artificial Sequence
  Synthetically generated peptide
  VARIANT (1)..(17): Xaa = Any Amino Acid
ACEWCANXPAXXCTXGC

SEQ ID NO: 13089 - protein, 17 aa, Artificial Sequence
  Synthetically generated peptide
  VARIANT (1)..(17): Xaa = Any Amino Acid
ACEWCANXPAXXCTGXC

SEQ ID NO: 13090 - protein, 16 aa, Artificial Sequence
  Synthetically generated peptide
  VARIANT (1)..(16): Xaa = Any Amino Acid
ACEWCANXPAXCXTGC

SEQ ID NO: 13091 - protein, 17 aa, Artificial Sequence
  Synthetically generated peptide
  VARIANT (1)..(17): Xaa = Any Amino Acid
ACEWCANXPAXCXXTGC

SEQ ID NO: 13092 - protein, 17 aa, Artificial Sequence
  Synthetically generated peptide
  VARIANT (1)..(17): Xaa = Any Amino Acid
ACEWCANXPAXCXTXGC

SEQ ID NO: 13093 - protein, 17 aa, Artificial Sequence
  Synthetically generated peptide
  VARIANT (1)..(17): Xaa = Any Amino Acid
ACEWCANXPAXCXTGXC

SEQ ID NO: 13094 - protein, 16 aa, Artificial Sequence
  Synthetically generated peptide
  VARIANT (1)..(16): Xaa = Any Amino Acid
ACEWCANXPAXCTXGC

SEQ ID NO: 13095 - protein, 17 aa, Artificial Sequence
  Synthetically generated peptide
  VARIANT (1)..(17): Xaa = Any Amino Acid
ACEWCANXPAXCTXXGC

SEQ ID NO: 13096 - protein, 17 aa, Artificial Sequence
  Synthetically generated peptide
  VARIANT (1)..(17): Xaa = Any Amino Acid
ACEWCANXPAXCTXGXC

SEQ ID NO: 13097 - protein, 16 aa, Artificial Sequence
  Synthetically generated peptide
  VARIANT (1)..(16): Xaa = Any Amino Acid
ACEWCANXPAXCTGXC

SEQ ID NO: 13098 - protein, 17 aa, Artificial Sequence
  Synthetically generated peptide
  VARIANT (1)..(17): Xaa = Any Amino Acid
ACEWCANXPAXCTGXXC

SEQ ID NO: 13099 - protein, 15 aa, Artificial Sequence
  Synthetically generated peptide
  VARIANT (1)..(15): Xaa = Any Amino Acid
ACEWCANXPACXTGC

SEQ ID NO: 13100 - protein, 16 aa, Artificial Sequence
  Synthetically generated peptide
  VARIANT (1)..(16): Xaa = Any Amino Acid
ACEWCANXPACXXTGC

SEQ ID NO: 13101 - protein, 17 aa, Artificial Sequence
  Synthetically generated peptide
  VARIANT (1)..(17): Xaa = Any Amino Acid
ACEWCANXPACXXXTGC

SEQ ID NO: 13102 - protein, 17 aa, Artificial Sequence
  Synthetically generated peptide
  VARIANT (1)..(17): Xaa = Any Amino Acid
ACEWCANXPACXXTXGC

SEQ ID NO: 13103 - protein, 17 aa, Artificial Sequence
  Synthetically generated peptide
  VARIANT (1)..(17): Xaa = Any Amino Acid
ACEWCANXPACXXTGXC

SEQ ID NO: 13104 - protein, 16 aa, Artificial Sequence
  Synthetically generated peptide
  VARIANT (1)..(16): Xaa = Any Amino Acid
ACEWCANXPACXTXGC

SEQ ID NO: 13105 - protein, 17 aa, Artificial Sequence
  Synthetically generated peptide
  VARIANT (1)..(17): Xaa = Any Amino Acid
ACEWCANXPACXTXXGC

SEQ ID NO: 13106 - protein, 17 aa, Artificial Sequence
  Synthetically generated peptide
  VARIANT (1)..(17): Xaa = Any Amino Acid
ACEWCANXPACXTXGXC

SEQ ID NO: 13107 - protein, 16 aa, Artificial Sequence
  Synthetically generated peptide
  VARIANT (1)..(16): Xaa = Any Amino Acid
ACEWCANXPACXTGXC

SEQ ID NO: 13108 - protein, 17 aa, Artificial Sequence
  Synthetically generated peptide
  VARIANT (1)..(17): Xaa = Any Amino Acid
ACEWCANXPACXTGXXC

SEQ ID NO: 13109 - protein, 15 aa, Artificial Sequence
  Synthetically generated peptide
  VARIANT (1)..(15): Xaa = Any Amino Acid
ACEWCANXPACTXGC

SEQ ID NO: 13110 - protein, 16 aa, Artificial Sequence
  Synthetically generated peptide
  VARIANT (1)..(16): Xaa = Any Amino Acid
ACEWCANXPACTXXGC

SEQ ID NO: 13111 - protein, 17 aa, Artificial Sequence
  Synthetically generated peptide
  VARIANT (1)..(17): Xaa = Any Amino Acid
ACEWCANXPACTXXXGC

SEQ ID NO: 13112 - protein, 17 aa, Artificial Sequence
  Synthetically generated peptide
  VARIANT (1)..(17): Xaa = Any Amino Acid
ACEWCANXPACTXXGXC

SEQ ID NO: 13113 - protein, 16 aa, Artificial Sequence
  Synthetically generated peptide
  VARIANT (1)..(16): Xaa = Any Amino Acid
ACEWCANXPACTXGXC

SEQ ID NO: 13114 - protein, 17 aa, Artificial Sequence
  Synthetically generated peptide
  VARIANT (1)..(17): Xaa = Any Amino Acid
ACEWCANXPACTXGXXC

SEQ ID NO: 13115 - protein, 15 aa, Artificial Sequence
  Synthetically generated peptide
  VARIANT (1)..(15): Xaa = Any Amino Acid
ACEWCANXPACTGXC

SEQ ID NO: 13116 - protein, 16 aa, Artificial Sequence
  Synthetically generated peptide
  VARIANT (1)..(16): Xaa = Any Amino Acid
ACEWCANXPACTGXXC

SEQ ID NO: 13117 - protein, 17 aa, Artificial Sequence
  Synthetically generated peptide
  VARIANT (1)..(17): Xaa = Any Amino Acid
ACEWCANXPACTGXXXC

SEQ ID NO: 13118 - protein, 14 aa, Artificial Sequence
  Synthetically generated peptide
  VARIANT (1)..(14): Xaa = Any Amino Acid
ACEWCANPXACTGC

SEQ ID NO: 13119 - protein, 15 aa, Artificial Sequence
  Synthetically generated peptide
  VARIANT (1)..(15): Xaa = Any Amino Acid
ACEWCANPXXACTGC

SEQ ID NO: 13120 - protein, 16 aa, Artificial Sequence
  Synthetically generated peptide
  VARIANT (1)..(16): Xaa = Any Amino Acid
ACEWCANPXXXACTGC

SEQ ID NO: 13121 - protein, 17 aa, Artificial Sequence
  Synthetically generated peptide
  VARIANT (1)..(17): Xaa = Any Amino Acid
ACEWCANPXXXXACTGC

SEQ ID NO: 13122 - protein, 17 aa, Artificial Sequence
  Synthetically generated peptide
  VARIANT (1)..(17): Xaa = Any Amino Acid
ACEWCANPXXXAXCTGC

SEQ ID NO: 13123 - protein, 17 aa, Artificial Sequence
  Synthetically generated peptide
  VARIANT (1)..(17): Xaa = Any Amino Acid
ACEWCANPXXXACXTGC

SEQ ID NO: 13124 - protein, 17 aa, Artificial Sequence
  Synthetically generated peptide
  VARIANT (1)..(17): Xaa = Any Amino Acid
ACEWCANPXXXACTXGC

SEQ ID NO: 13125 - protein, 17 aa, Artificial Sequence
  Synthetically generated peptide
  VARIANT (1)..(17): Xaa = Any Amino Acid
ACEWCANPXXXACTGXC

SEQ ID NO: 13126 - protein, 16 aa, Artificial Sequence
  Synthetically generated peptide
  VARIANT (1)..(16): Xaa = Any Amino Acid
ACEWCANPXXAXCTGC

SEQ ID NO: 13127 - protein, 17 aa, Artificial Sequence
  Synthetically generated peptide
  VARIANT (1)..(17): Xaa = Any Amino Acid
ACEWCANPXXAXXCTGC

SEQ ID NO: 13128 - protein, 17 aa, Artificial Sequence
  Synthetically generated peptide
  VARIANT (1)..(17): Xaa = Any Amino Acid
ACEWCANPXXAXCXTGC

SEQ ID NO: 13129 - protein, 17 aa, Artificial Sequence
  Synthetically generated peptide
  VARIANT (1)..(17): Xaa = Any Amino Acid
ACEWCANPXXAXCTXGC

SEQ ID NO: 13130 - protein, 17 aa, Artificial Sequence
  Synthetically generated peptide
  VARIANT (1)..(17): Xaa = Any Amino Acid
ACEWCANPXXAXCTGXC

SEQ ID NO: 13131 - protein, 16 aa, Artificial Sequence
  Synthetically generated peptide
  VARIANT (1)..(16): Xaa = Any Amino Acid
ACEWCANPXXACXTGC

SEQ ID NO: 13132 - protein, 17 aa, Artificial Sequence
  Synthetically generated peptide
  VARIANT (1)..(17): Xaa = Any Amino Acid
ACEWCANPXXACXXTGC

SEQ ID NO: 13133 - protein, 17 aa, Artificial Sequence
  Synthetically generated peptide
  VARIANT (1)..(17): Xaa = Any Amino Acid
ACEWCANPXXACXTXGC

SEQ ID NO: 13134 - protein, 17 aa, Artificial Sequence
  Synthetically generated peptide
  VARIANT (1)..(17): Xaa = Any Amino Acid
ACEWCANPXXACXTGXC

SEQ ID NO: 13135 - protein, 16 aa, Artificial Sequence
  Synthetically generated peptide
  VARIANT (1)..(16): Xaa = Any Amino Acid
ACEWCANPXXACTXGC

SEQ ID NO: 13136 - protein, 17 aa, Artificial Sequence
  Synthetically generated peptide
  VARIANT (1)..(17): Xaa = Any Amino Acid
ACEWCANPXXACTXXGC

SEQ ID NO: 13137 - protein, 17 aa, Artificial Sequence
  Synthetically generated peptide
  VARIANT (1)..(17): Xaa = Any Amino Acid
ACEWCANPXXACTXGXC

SEQ ID NO: 13138 - protein, 16 aa, Artificial Sequence
  Synthetically generated peptide
  VARIANT (1)..(16): Xaa = Any Amino Acid
ACEWCANPXXACTGXC

SEQ ID NO: 13139 - protein, 17 aa, Artificial Sequence
  Synthetically generated peptide
  VARIANT (1)..(17): Xaa = Any Amino Acid
ACEWCANPXXACTGXXC

SEQ ID NO: 13140 - protein, 15 aa, Artificial Sequence
  Synthetically generated peptide
  VARIANT (1)..(15): Xaa = Any Amino Acid
ACEWCANPXAXCTGC

SEQ ID NO: 13141 - protein, 16 aa, Artificial Sequence
  Synthetically generated peptide
  VARIANT (1)..(16): Xaa = Any Amino Acid
ACEWCANPXAXXCTGC

SEQ ID NO: 13142 - protein, 17 aa, Artificial Sequence
  Synthetically generated peptide
  VARIANT (1)..(17): Xaa = Any Amino Acid
ACEWCANPXAXXXCTGC

SEQ ID NO: 13143 - protein, 17 aa, Artificial Sequence
  Synthetically generated peptide
  VARIANT (1)..(17): Xaa = Any Amino Acid
ACEWCANPXAXXCXTGC

SEQ ID NO: 13144 - protein, 17 aa, Artificial Sequence
  Synthetically generated peptide
  VARIANT (1)..(17): Xaa = Any Amino Acid
ACEWCANPXAXXCTXGC

SEQ ID NO: 13145 - protein, 17 aa, Artificial Sequence
  Synthetically generated peptide
  VARIANT (1)..(17): Xaa = Any Amino Acid
ACEWCANPXAXXCTGXC

SEQ ID NO: 13146 - protein, 16 aa, Artificial Sequence
  Synthetically generated peptide
  VARIANT (1)..(16): Xaa = Any Amino Acid
ACEWCANPXAXCXTGC

SEQ ID NO: 13147 - protein, 17 aa, Artificial Sequence
  Synthetically generated peptide
  VARIANT (1)..(17): Xaa = Any Amino Acid
ACEWCANPXAXCXXTGC

SEQ ID NO: 13148 - protein, 17 aa, Artificial Sequence
  Synthetically generated peptide
  VARIANT (1)..(17): Xaa = Any Amino Acid
ACEWCANPXAXCXTXGC

SEQ ID NO: 13149 - protein, 17 aa, Artificial Sequence
  Synthetically generated peptide
  VARIANT (1)..(17): Xaa = Any Amino Acid
ACEWCANPXAXCXTGXC

SEQ ID NO: 13150 - protein, 16 aa, Artificial Sequence
  Synthetically generated peptide
  VARIANT (1)..(16): Xaa = Any Amino Acid
ACEWCANPXAXCTXGC

SEQ ID NO: 13151 - protein, 17 aa, Artificial Sequence
  Synthetically generated peptide
  VARIANT (1)..(17): Xaa = Any Amino Acid
ACEWCANPXAXCTXXGC

SEQ ID NO: 13152 - protein, 17 aa, Artificial Sequence
  Synthetically generated peptide
  VARIANT (1)..(17): Xaa = Any Amino Acid
ACEWCANPXAXCTXGXC

SEQ ID NO: 13153 - protein, 16 aa, Artificial Sequence
  Synthetically generated peptide
  VARIANT (1)..(16): Xaa = Any Amino Acid
ACEWCANPXAXCTGXC

SEQ ID NO: 13154 - protein, 17 aa, Artificial Sequence
  Synthetically generated peptide
  VARIANT (1)..(17): Xaa = Any Amino Acid
ACEWCANPXAXCTGXXC

SEQ ID NO: 13155 - protein, 15 aa, Artificial Sequence
  Synthetically generated peptide
  VARIANT (1)..(15): Xaa = Any Amino Acid
ACEWCANPXACXTGC

SEQ ID NO: 13156 - protein, 16 aa, Artificial Sequence
  Synthetically generated peptide
  VARIANT (1)..(16): Xaa = Any Amino Acid
ACEWCANPXACXXTGC

SEQ ID NO: 13157 - protein, 17 aa, Artificial Sequence
  Synthetically generated peptide
  VARIANT (1)..(17): Xaa = Any Amino Acid
ACEWCANPXACXXXTGC

SEQ ID NO: 13158 - protein, 17 aa, Artificial Sequence
  Synthetically generated peptide
  VARIANT (1)..(17): Xaa = Any Amino Acid
ACEWCANPXACXXTXGC

SEQ ID NO: 13159 - protein, 17 aa, Artificial Sequence
  Synthetically generated peptide
  VARIANT (1)..(17): Xaa = Any Amino Acid
ACEWCANPXACXXTGXC

SEQ ID NO: 13160 - protein, 16 aa, Artificial Sequence
  Synthetically generated peptide
  VARIANT (1)..(16): Xaa = Any Amino Acid
ACEWCANPXACXTXGC

SEQ ID NO: 13161 - protein, 17 aa, Artificial Sequence
  Synthetically generated peptide
  VARIANT (1)..(17): Xaa = Any Amino Acid
ACEWCANPXACXTXXGC

SEQ ID NO: 13162 - protein, 17 aa, Artificial Sequence
  Synthetically generated peptide
  VARIANT (1)..(17): Xaa = Any Amino Acid
ACEWCANPXACXTXGXC

SEQ ID NO: 13163 - protein, 16 aa, Artificial Sequence
  Synthetically generated peptide
  VARIANT (1)..(16): Xaa = Any Amino Acid
ACEWCANPXACXTGXC

SEQ ID NO: 13164 - protein, 17 aa, Artificial Sequence
  Synthetically generated peptide
  VARIANT (1)..(17): Xaa = Any Amino Acid
ACEWCANPXACXTGXXC

SEQ ID NO: 13165 - protein, 15 aa, Artificial Sequence
  Synthetically generated peptide
  VARIANT (1)..(15): Xaa = Any Amino Acid
ACEWCANPXACTXGC

SEQ ID NO: 13166 - protein, 16 aa, Artificial Sequence
  Synthetically generated peptide
  VARIANT (1)..(16): Xaa = Any Amino Acid
ACEWCANPXACTXXGC

SEQ ID NO: 13167 - protein, 17 aa, Artificial Sequence
  Synthetically generated peptide
  VARIANT (1)..(17): Xaa = Any Amino Acid
ACEWCANPXACTXXXGC

SEQ ID NO: 13168 - protein, 17 aa, Artificial Sequence
  Synthetically generated peptide
  VARIANT (1)..(17): Xaa = Any Amino Acid
ACEWCANPXACTXXGXC

SEQ ID NO: 13169 - protein, 16 aa, Artificial Sequence
  Synthetically generated peptide
  VARIANT (1)..(16): Xaa = Any Amino Acid
ACEWCANPXACTXGXC

SEQ ID NO: 13170 - protein, 17 aa, Artificial Sequence
  Synthetically generated peptide
  VARIANT (1)..(17): Xaa = Any Amino Acid
ACEWCANPXACTXGXXC

SEQ ID NO: 13171 - protein, 15 aa, Artificial Sequence
  Synthetically generated peptide
  VARIANT (1)..(15): Xaa = Any Amino Acid
ACEWCANPXACTGXC

SEQ ID NO: 13172 - protein, 16 aa, Artificial Sequence
  Synthetically generated peptide
  VARIANT (1)..(16): Xaa = Any Amino Acid
ACEWCANPXACTGXXC

SEQ ID NO: 13173 - protein, 17 aa, Artificial Sequence
  Synthetically generated peptide
  VARIANT (1)..(17): Xaa = Any Amino Acid
ACEWCANPXACTGXXXC

SEQ ID NO: 13174 - protein, 14 aa, Artificial Sequence
  Synthetically generated peptide
  VARIANT (1)..(14): Xaa = Any Amino Acid
ACEWCANPAXCTGC

SEQ ID NO: 13175 - protein, 15 aa, Artificial Sequence
  Synthetically generated peptide
  VARIANT (1)..(15): Xaa = Any Amino Acid
ACEWCANPAXXCTGC

SEQ ID NO: 13176 - protein, 16 aa, Artificial Sequence
  Synthetically generated peptide
  VARIANT (1)..(16): Xaa = Any Amino Acid
ACEWCANPAXXXCTGC

SEQ ID NO: 13177 - protein, 17 aa, Artificial Sequence
  Synthetically generated peptide
  VARIANT (1)..(17): Xaa = Any Amino Acid
ACEWCANPAXXXXCTGC

SEQ ID NO: 13178 - protein, 17 aa, Artificial Sequence
  Synthetically generated peptide
  VARIANT (1)..(17): Xaa = Any Amino Acid
ACEWCANPAXXXCXTGC

SEQ ID NO: 13179 - protein, 17 aa, Artificial Sequence
  Synthetically generated peptide
  VARIANT (1)..(17): Xaa = Any Amino Acid
ACEWCANPAXXXCTXGC

SEQ ID NO: 13180 - protein, 17 aa, Artificial Sequence
  Synthetically generated peptide
  VARIANT (1)..(17): Xaa = Any Amino Acid
ACEWCANPAXXXCTGXC

SEQ ID NO: 13181 - protein, 16 aa, Artificial Sequence
  Synthetically generated peptide
  VARIANT (1)..(16): Xaa = Any Amino Acid
ACEWCANPAXXCXTGC

SEQ ID NO: 13182 - protein, 17 aa, Artificial Sequence
  Synthetically generated peptide
  VARIANT (1)..(17): Xaa = Any Amino Acid
ACEWCANPAXXCXXTGC

SEQ ID NO: 13183 - protein, 17 aa, Artificial Sequence
  Synthetically generated peptide
  VARIANT (1)..(17): Xaa = Any Amino Acid
ACEWCANPAXXCXTXGC

SEQ ID NO: 13184 - protein, 17 aa, Artificial Sequence
  Synthetically generated peptide
  VARIANT (1)..(17): Xaa = Any Amino Acid
ACEWCANPAXXCXTGXC

SEQ ID NO: 13185 - protein, 16 aa, Artificial Sequence
  Synthetically generated peptide
  VARIANT (1)..(16): Xaa = Any Amino Acid
ACEWCANPAXXCTXGC

SEQ ID NO: 13186 - protein, 17 aa, Artificial Sequence
  Synthetically generated peptide
  VARIANT (1)..(17): Xaa = Any Amino Acid
ACEWCANPAXXCTXXGC

SEQ ID NO: 13187 - protein, 17 aa, Artificial Sequence
  Synthetically generated peptide
  VARIANT (1)..(17): Xaa = Any Amino Acid
ACEWCANPAXXCTXGXC

SEQ ID NO: 13188 - protein, 16 aa, Artificial Sequence
  Synthetically generated peptide
  VARIANT (1)..(16): Xaa = Any Amino Acid
ACEWCANPAXXCTGXC

SEQ ID NO: 13189 - protein, 17 aa, Artificial Sequence
  Synthetically generated peptide
  VARIANT (1)..(17): Xaa = Any Amino Acid
ACEWCANPAXXCTGXXC

SEQ ID NO: 13190 - protein, 15 aa, Artificial Sequence
  Synthetically generated peptide
  VARIANT (1)..(15): Xaa = Any Amino Acid
ACEWCANPAXCXTGC

SEQ ID NO: 13191 - protein, 16 aa, Artificial Sequence
  Synthetically generated peptide
  VARIANT (1)..(16): Xaa = Any Amino Acid
ACEWCANPAXCXXTGC

SEQ ID NO: 13192 - protein, 17 aa, Artificial Sequence
  Synthetically generated peptide
  VARIANT (1)..(17): Xaa = Any Amino Acid
ACEWCANPAXCXXXTGC

SEQ ID NO: 13193 - protein, 17 aa, Artificial Sequence
  Synthetically generated peptide
  VARIANT (1)..(17): Xaa = Any Amino Acid
ACEWCANPAXCXXTXGC

SEQ ID NO: 13194 - protein, 17 aa, Artificial Sequence
  Synthetically generated peptide
  VARIANT (1)..(17): Xaa = Any Amino Acid
ACEWCANPAXCXXTGXC

SEQ ID NO: 13195 - protein, 16 aa, Artificial Sequence
  Synthetically generated peptide
  VARIANT (1)..(16): Xaa = Any Amino Acid
ACEWCANPAXCXTXGC

SEQ ID NO: 13196 - protein, 17 aa, Artificial Sequence
  Synthetically generated peptide
  VARIANT (1)..(17): Xaa = Any Amino Acid
ACEWCANPAXCXTXXGC

SEQ ID NO: 13197 - protein, 17 aa, Artificial Sequence
  Synthetically generated peptide
  VARIANT (1)..(17): Xaa = Any Amino Acid
ACEWCANPAXCXTXGXC

SEQ ID NO: 13198 - protein, 16 aa, Artificial Sequence
  Synthetically generated peptide
  VARIANT (1)..(16): Xaa = Any Amino Acid
ACEWCANPAXCXTGXC

SEQ ID NO: 13199 - protein, 17 aa, Artificial Sequence
  Synthetically generated peptide
  VARIANT (1)..(17): Xaa = Any Amino Acid
ACEWCANPAXCXTGXXC

SEQ ID NO: 13200 - protein, 15 aa, Artificial Sequence
  Synthetically generated peptide
  VARIANT (1)..(15): Xaa = Any Amino Acid
ACEWCANPAXCTXGC

SEQ ID NO: 13201 - protein, 16 aa, Artificial Sequence
  Synthetically generated peptide
  VARIANT (1)..(16): Xaa = Any Amino Acid
ACEWCANPAXCTXXGC

SEQ ID NO: 13202 - protein, 17 aa, Artificial Sequence
  Synthetically generated peptide
  VARIANT (1)..(17): Xaa = Any Amino Acid
ACEWCANPAXCTXXXGC

SEQ ID NO: 13203 - protein, 17 aa, Artificial Sequence
  Synthetically generated peptide
  VARIANT (1)..(17): Xaa = Any Amino Acid
ACEWCANPAXCTXXGXC

SEQ ID NO: 13204 - protein, 16 aa, Artificial Sequence
  Synthetically generated peptide
  VARIANT (1)..(16): Xaa = Any Amino Acid
ACEWCANPAXCTXGXC

SEQ ID NO: 13205 - protein, 17 aa, Artificial Sequence
  Synthetically generated peptide
  VARIANT (1)..(17): Xaa = Any Amino Acid
ACEWCANPAXCTXGXXC

SEQ ID NO: 13206 - protein, 15 aa, Artificial Sequence
  Synthetically generated peptide
  VARIANT (1)..(15): Xaa = Any Amino Acid
ACEWCANPAXCTGXC

SEQ ID NO: 13207 - protein, 16 aa, Artificial Sequence
  Synthetically generated peptide
  VARIANT (1)..(16): Xaa = Any Amino Acid
ACEWCANPAXCTGXXC

SEQ ID NO: 13208 - protein, 17 aa, Artificial Sequence
  Synthetically generated peptide
  VARIANT (1)..(17): Xaa = Any Amino Acid
ACEWCANPAXCTGXXXC

SEQ ID NO: 13209 - protein, 14 aa, Artificial Sequence
  Synthetically generated peptide
  VARIANT (1)..(14): Xaa = Any Amino Acid
ACEWCANPACXTGC

SEQ ID NO: 13210 - protein, 15 aa, Artificial Sequence
  Synthetically generated peptide
  VARIANT (1)..(15): Xaa = Any Amino Acid
ACEWCANPACXXTGC

SEQ ID NO: 13211 - protein, 16 aa, Artificial Sequence
  Synthetically generated peptide
  VARIANT (1)..(16): Xaa = Any Amino Acid
ACEWCANPACXXXTGC

SEQ ID NO: 13212 - protein, 17 aa, Artificial Sequence
  Synthetically generated peptide
  VARIANT (1)..(17): Xaa = Any Amino Acid
ACEWCANPACXXXXTGC

SEQ ID NO: 13213 - protein, 17 aa, Artificial Sequence
  Synthetically generated peptide
  VARIANT (1)..(17): Xaa = Any Amino Acid
ACEWCANPACXXXTXGC

SEQ ID NO: 13214 - protein, 17 aa, Artificial Sequence
  Synthetically generated peptide
  VARIANT (1)..(17): Xaa = Any Amino Acid
ACEWCANPACXXXTGXC

SEQ ID NO: 13215 - protein, 16 aa, Artificial Sequence
  Synthetically generated peptide
  VARIANT (1)..(16): Xaa = Any Amino Acid
ACEWCANPACXXTXGC

SEQ ID NO: 13216 - protein, 17 aa, Artificial Sequence
  Synthetically generated peptide
  VARIANT (1)..(17): Xaa = Any Amino Acid
ACEWCANPACXXTXXGC

SEQ ID NO: 13217 - protein, 17 aa, Artificial Sequence
  Synthetically generated peptide
  VARIANT (1)..(17): Xaa = Any Amino Acid
ACEWCANPACXXTXGXC

SEQ ID NO: 13218 - protein, 16 aa, Artificial Sequence
  Synthetically generated peptide
  VARIANT (1)..(16): Xaa = Any Amino Acid
ACEWCANPACXXTGXC

SEQ ID NO: 13219 - protein, 17 aa, Artificial Sequence
  Synthetically generated peptide
  VARIANT (1)..(17): Xaa = Any Amino Acid
ACEWCANPACXXTGXXC

SEQ ID NO: 13220 - protein, 15 aa, Artificial Sequence
  Synthetically generated peptide
  VARIANT (1)..(15): Xaa = Any Amino Acid
ACEWCANPACXTXGC

SEQ ID NO: 13221 - protein, 16 aa, Artificial Sequence
  Synthetically generated peptide
  VARIANT (1)..(16): Xaa = Any Amino Acid
ACEWCANPACXTXXGC

SEQ ID NO: 13222 - protein, 17 aa, Artificial Sequence
  Synthetically generated peptide
  VARIANT (1)..(17): Xaa = Any Amino Acid
ACEWCANPACXTXXXGC

SEQ ID NO: 13223 - protein, 17 aa, Artificial Sequence
  Synthetically generated peptide
  VARIANT (1)..(17): Xaa = Any Amino Acid
ACEWCANPACXTXXGXC

SEQ ID NO: 13224 - protein, 16 aa, Artificial Sequence
  Synthetically generated peptide
  VARIANT (1)..(16): Xaa = Any Amino Acid
ACEWCANPACXTXGXC

SEQ ID NO: 13225 - protein, 17 aa, Artificial Sequence
  Synthetically generated peptide
  VARIANT (1)..(17): Xaa = Any Amino Acid
ACEWCANPACXTXGXXC

SEQ ID NO: 13226 - protein, 15 aa, Artificial Sequence
  Synthetically generated peptide
  VARIANT (1)..(15): Xaa = Any Amino Acid
ACEWCANPACXTGXC

SEQ ID NO: 13227 - protein, 16 aa, Artificial Sequence
  Synthetically generated peptide
  VARIANT (1)..(16): Xaa = Any Amino Acid
ACEWCANPACXTGXXC

SEQ ID NO: 13228 - protein, 17 aa, Artificial Sequence
  Synthetically generated peptide
  VARIANT (1)..(17): Xaa = Any Amino Acid
ACEWCANPACXTGXXXC

SEQ ID NO: 13229 - protein, 14 aa, Artificial Sequence
  Synthetically generated peptide
  VARIANT (1)..(14): Xaa = Any Amino Acid
ACEWCANPACTXGC

SEQ ID NO: 13230 - protein, 15 aa, Artificial Sequence
  Synthetically generated peptide
  VARIANT (1)..(15): Xaa = Any Amino Acid
ACEWCANPACTXXGC

SEQ ID NO: 13231 - protein, 16 aa, Artificial Sequence
  Synthetically generated peptide
  VARIANT (1)..(16): Xaa = Any Amino Acid
ACEWCANPACTXXXGC

SEQ ID NO: 13232 - protein, 17 aa, Artificial Sequence
  Synthetically generated peptide
  VARIANT (1)..(17): Xaa = Any Amino Acid
ACEWCANPACTXXXXGC

SEQ ID NO: 13233 - protein, 17 aa, Artificial Sequence
  Synthetically generated peptide
  VARIANT (1)..(17): Xaa = Any Amino Acid
ACEWCANPACTXXXGXC

SEQ ID NO: 13234 - protein, 16 aa, Artificial Sequence
  Synthetically generated peptide
  VARIANT (1)..(16): Xaa = Any Amino Acid
ACEWCANPACTXXGXC

SEQ ID NO: 13235 - protein, 17 aa, Artificial Sequence
  Synthetically generated peptide
  VARIANT (1)..(17): Xaa = Any Amino Acid
ACEWCANPACTXXGXXC

SEQ ID NO: 13236 - protein, 15 aa, Artificial Sequence
  Synthetically generated peptide
  VARIANT (1)..(15): Xaa = Any Amino Acid
ACEWCANPACTXGXC

SEQ ID NO: 13237 - protein, 16 aa, Artificial Sequence
  Synthetically generated peptide
  VARIANT (1)..(16): Xaa = Any Amino Acid
ACEWCANPACTXGXXC

SEQ ID NO: 13238 - protein, 17 aa, Artificial Sequence
  Synthetically generated peptide
  VARIANT (1)..(17): Xaa = Any Amino Acid
ACEWCANPACTXGXXXC

SEQ ID NO: 13239 - protein, 14 aa, Artificial Sequence
  Synthetically generated peptide
  VARIANT (1)..(14): Xaa = Any Amino Acid
ACEWCANPACTGXC

SEQ ID NO: 13240 - protein, 15 aa, Artificial Sequence
  Synthetically generated peptide
  VARIANT (1)..(15): Xaa = Any Amino Acid
ACEWCANPACTGXXC

SEQ ID NO: 13241 - protein, 16 aa, Artificial Sequence
  Synthetically generated peptide
  VARIANT (1)..(16): Xaa = Any Amino Acid
ACEWCANPACTGXXXC

SEQ ID NO: 13242 - protein, 17 aa, Artificial Sequence
  Synthetically generated peptide
  VARIANT (1)..(17): Xaa = Any Amino Acid
ACEWCANPACTGXXXXC

SEQ ID NO: 13243 - protein, 14 aa, Artificial Sequence
  Synthetically generated peptide
  VARIANT (1)..(14): Xaa = Any Amino Acid
CCXEWACNPACTGA

SEQ ID NO: 13244 - protein, 15 aa, Artificial Sequence
  Synthetically generated peptide
  VARIANT (1)..(15): Xaa = Any Amino Acid
CCXXEWACNPACTGA

SEQ ID NO: 13245 - protein, 16 aa, Artificial Sequence
  Synthetically generated peptide
  VARIANT (1)..(16): Xaa = Any Amino Acid
CCXXXEWACNPACTGA

SEQ ID NO: 13246 - protein, 17 aa, Artificial Sequence
  Synthetically generated peptide
  VARIANT (1)..(17): Xaa = Any Amino Acid
CCXXXXEWACNPACTGA

SEQ ID NO: 13247 - protein, 17 aa, Artificial Sequence
  Synthetically generated peptide
  VARIANT (1)..(17): Xaa = Any Amino Acid
CCXXXEXWACNPACTGA

SEQ ID NO: 13248 - protein, 17 aa, Artificial Sequence
  Synthetically generated peptide
  VARIANT (1)..(17): Xaa = Any Amino Acid
CCXXXEWXACNPACTGA

SEQ ID NO: 13249 - protein, 17 aa, Artificial Sequence
  Synthetically generated peptide
  VARIANT (1)..(17): Xaa = Any Amino Acid
CCXXXEWACXNPACTGA

SEQ ID NO: 13250 - protein, 17 aa, Artificial Sequence
  Synthetically generated peptide
  VARIANT (1)..(17): Xaa = Any Amino Acid
CCXXXEWACNXPACTGA

SEQ ID NO: 13251 - protein, 17 aa, Artificial Sequence
  Synthetically generated peptide
  VARIANT (1)..(17): Xaa = Any Amino Acid
CCXXXEWACNPXACTGA

SEQ ID NO: 13252 - protein, 17 aa, Artificial Sequence
  Synthetically generated peptide
  VARIANT (1)..(17): Xaa = Any Amino Acid
CCXXXEWACNPAXCTGA

SEQ ID NO: 13253 - protein, 17 aa, Artificial Sequence
  Synthetically generated peptide
  VARIANT (1)..(17): Xaa = Any Amino Acid
CCXXXEWACNPACXTGA

SEQ ID NO: 13254 - protein, 17 aa, Artificial Sequence
  Synthetically generated peptide
  VARIANT (1)..(17): Xaa = Any Amino Acid
CCXXXEWACNPACTXGA

SEQ ID NO: 13255 - protein, 17 aa, Artificial Sequence
  Synthetically generated peptide
  VARIANT (1)..(17): Xaa = Any Amino Acid
CCXXXEWACNPACTGXA

SEQ ID NO: 13256 - protein, 16 aa, Artificial Sequence
  Synthetically generated peptide
  VARIANT (1)..(16): Xaa = Any Amino Acid
CCXXEXWACNPACTGA

SEQ ID NO: 13257 - protein, 17 aa, Artificial Sequence
  Synthetically generated peptide
  VARIANT (1)..(17): Xaa = Any Amino Acid
CCXXEXXWACNPACTGA

SEQ ID NO: 13258 - protein, 17 aa, Artificial Sequence
  Synthetically generated peptide
  VARIANT (1)..(17): Xaa = Any Amino Acid
CCXXEXWXACNPACTGA

SEQ ID NO: 13259 - protein, 17 aa, Artificial Sequence
  Synthetically generated peptide
  VARIANT (1)..(17): Xaa = Any Amino Acid
CCXXEXWACXNPACTGA

SEQ ID NO: 13260 - protein, 17 aa, Artificial Sequence
  Synthetically generated peptide
  VARIANT (1)..(17): Xaa = Any Amino Acid
CCXXEXWACNXPACTGA

SEQ ID NO: 13261 - protein, 17 aa, Artificial Sequence
  Synthetically generated peptide
  VARIANT (1)..(17): Xaa = Any Amino Acid
CCXXEXWACNPXACTGA

SEQ ID NO: 13262 - protein, 17 aa, Artificial Sequence
  Synthetically generated peptide
  VARIANT (1)..(17): Xaa = Any Amino Acid
CCXXEXWACNPAXCTGA

SEQ ID NO: 13263 - protein, 17 aa, Artificial Sequence
  Synthetically generated peptide
  VARIANT (1)..(17): Xaa = Any Amino Acid
CCXXEXWACNPACXTGA

SEQ ID NO: 13264 - protein, 17 aa, Artificial Sequence
  Synthetically generated peptide
  VARIANT (1)..(17): Xaa = Any Amino Acid
CCXXEXWACNPACTXGA

SEQ ID NO: 13265 - protein, 17 aa, Artificial Sequence
  Synthetically generated peptide
  VARIANT (1)..(17): Xaa = Any Amino Acid
CCXXEXWACNPACTGXA

SEQ ID NO: 13266 - protein, 16 aa, Artificial Sequence
  Synthetically generated peptide
  VARIANT (1)..(16): Xaa = Any Amino Acid
CCXXEWXACNPACTGA

SEQ ID NO: 13267 - protein, 17 aa, Artificial Sequence
  Synthetically generated peptide
  VARIANT (1)..(17): Xaa = Any Amino Acid
CCXXEWXXACNPACTGA

SEQ ID NO: 13268 - protein, 17 aa, Artificial Sequence
  Synthetically generated peptide
  VARIANT (1)..(17): Xaa = Any Amino Acid
CCXXEWXACXNPACTGA

SEQ ID NO: 13269 - protein, 17 aa, Artificial Sequence
  Synthetically generated peptide
  VARIANT (1)..(17): Xaa = Any Amino Acid
CCXXEWXACNXPACTGA

SEQ ID NO: 13270 - protein, 17 aa, Artificial Sequence
  Synthetically generated peptide
  VARIANT (1)..(17): Xaa = Any Amino Acid
CCXXEWXACNPXACTGA

SEQ ID NO: 13271 - protein, 17 aa, Artificial Sequence
  Synthetically generated peptide
  VARIANT (1)..(17): Xaa = Any Amino Acid
CCXXEWXACNPAXCTGA

SEQ ID NO: 13272 - protein, 17 aa, Artificial Sequence
  Synthetically generated peptide
  VARIANT (1)..(17): Xaa = Any Amino Acid
CCXXEWXACNPACXTGA

SEQ ID NO: 13273 - protein, 17 aa, Artificial Sequence
  Synthetically generated peptide
  VARIANT (1)..(17): Xaa = Any Amino Acid
CCXXEWXACNPACTXGA

SEQ ID NO: 13274 - protein, 17 aa, Artificial Sequence
  Synthetically generated peptide
  VARIANT (1)..(17): Xaa = Any Amino Acid
CCXXEWXACNPACTGXA

SEQ ID NO: 13275 - protein, 16 aa, Artificial Sequence
  Synthetically generated peptide
  VARIANT (1)..(16): Xaa = Any Amino Acid
CCXXEWACXNPACTGA

SEQ ID NO: 13276 - protein, 17 aa, Artificial Sequence
  Synthetically generated peptide
  VARIANT (1)..(17): Xaa = Any Amino Acid
CCXXEWACXXNPACTGA

SEQ ID NO: 13277 - protein, 17 aa, Artificial Sequence
  Synthetically generated peptide
  VARIANT (1)..(17): Xaa = Any Amino Acid
CCXXEWACXNXPACTGA

SEQ ID NO: 13278 - protein, 17 aa, Artificial Sequence
  Synthetically generated peptide
  VARIANT (1)..(17): Xaa = Any Amino Acid
CCXXEWACXNPXACTGA

SEQ ID NO: 13279 - protein, 17 aa, Artificial Sequence
  Synthetically generated peptide
  VARIANT (1)..(17): Xaa = Any Amino Acid
CCXXEWACXNPAXCTGA

SEQ ID NO: 13280 - protein, 17 aa, Artificial Sequence
  Synthetically generated peptide
  VARIANT (1)..(17): Xaa = Any Amino Acid
CCXXEWACXNPACXTGA

SEQ ID NO: 13281 - protein, 17 aa, Artificial Sequence
  Synthetically generated peptide
  VARIANT (1)..(17): Xaa = Any Amino Acid
CCXXEWACXNPACTXGA

SEQ ID NO: 13282 - protein, 17 aa, Artificial Sequence
  Synthetically generated peptide
  VARIANT (1)..(17): Xaa = Any Amino Acid
CCXXEWACXNPACTGXA

SEQ ID NO: 13283 - protein, 16 aa, Artificial Sequence
  Synthetically generated peptide
  VARIANT (1)..(16): Xaa = Any Amino Acid
CCXXEWACNXPACTGA

SEQ ID NO: 13284 - protein, 17 aa, Artificial Sequence
  Synthetically generated peptide
  VARIANT (1)..(17): Xaa = Any Amino Acid
CCXXEWACNXXPACTGA

SEQ ID NO: 13285 - protein, 17 aa, Artificial Sequence
  Synthetically generated peptide
  VARIANT (1)..(17): Xaa = Any Amino Acid
CCXXEWACNXPXACTGA

SEQ ID NO: 13286 - protein, 17 aa, Artificial Sequence
  Synthetically generated peptide
  VARIANT (1)..(17): Xaa = Any Amino Acid
CCXXEWACNXPAXCTGA

SEQ ID NO: 13287 - protein, 17 aa, Artificial Sequence
  Synthetically generated peptide
  VARIANT (1)..(17): Xaa = Any Amino Acid
CCXXEWACNXPACXTGA

SEQ ID NO: 13288 - protein, 17 aa, Artificial Sequence
  Synthetically generated peptide
  VARIANT (1)..(17): Xaa = Any Amino Acid
CCXXEWACNXPACTXGA

SEQ ID NO: 13289 - protein, 17 aa, Artificial Sequence
  Synthetically generated peptide
  VARIANT (1)..(17): Xaa = Any Amino Acid
CCXXEWACNXPACTGXA

SEQ ID NO: 13290 - protein, 16 aa, Artificial Sequence
  Synthetically generated peptide
  VARIANT (1)..(16): Xaa = Any Amino Acid
CCXXEWACNPXACTGA

SEQ ID NO: 13291 - protein, 17 aa, Artificial Sequence
  Synthetically generated peptide
  VARIANT (1)..(17): Xaa = Any Amino Acid
CCXXEWACNPXXACTGA

SEQ ID NO: 13292 - protein, 17 aa, Artificial Sequence
  Synthetically generated peptide
  VARIANT (1)..(17): Xaa = Any Amino Acid
CCXXEWACNPXAXCTGA

SEQ ID NO: 13293 - protein, 17 aa, Artificial Sequence
  Synthetically generated peptide
  VARIANT (1)..(17): Xaa = Any Amino Acid
CCXXEWACNPXACXTGA

SEQ ID NO: 13294 - protein, 17 aa, Artificial Sequence
  Synthetically generated peptide
  VARIANT (1)..(17): Xaa = Any Amino Acid
CCXXEWACNPXACTXGA

SEQ ID NO: 13295 - protein, 17 aa, Artificial Sequence
  Synthetically generated peptide
  VARIANT (1)..(17): Xaa = Any Amino Acid
CCXXEWACNPXACTGXA

SEQ ID NO: 13296 - protein, 16 aa, Artificial Sequence
  Synthetically generated peptide
  VARIANT (1)..(16): Xaa = Any Amino Acid
CCXXEWACNPAXCTGA

SEQ ID NO: 13297 - protein, 17 aa, Artificial Sequence
  Synthetically generated peptide
  VARIANT (1)..(17): Xaa = Any Amino Acid
CCXXEWACNPAXXCTGA

SEQ ID NO: 13298 - protein, 17 aa, Artificial Sequence
  Synthetically generated peptide
  VARIANT (1)..(17): Xaa = Any Amino Acid
CCXXEWACNPAXCXTGA

SEQ ID NO: 13299 - protein, 17 aa, Artificial Sequence
  Synthetically generated peptide
  VARIANT (1)..(17): Xaa = Any Amino Acid
CCXXEWACNPAXCTXGA

SEQ ID NO: 13300 - protein, 17 aa, Artificial Sequence
  Synthetically generated peptide
  VARIANT (1)..(17): Xaa = Any Amino Acid
CCXXEWACNPAXCTGXA

SEQ ID NO: 13301 - protein, 16 aa, Artificial Sequence
  Synthetically generated peptide
  VARIANT (1)..(16): Xaa = Any Amino Acid
CCXXEWACNPACXTGA

SEQ ID NO: 13302 - protein, 17 aa, Artificial Sequence
  Synthetically generated peptide
  VARIANT (1)..(17): Xaa = Any Amino Acid
CCXXEWACNPACXXTGA

SEQ ID NO: 13303 - protein, 17 aa, Artificial Sequence
  Synthetically generated peptide
  VARIANT (1)..(17): Xaa = Any Amino Acid
CCXXEWACNPACXTXGA

SEQ ID NO: 13304 - protein, 17 aa, Artificial Sequence
  Synthetically generated peptide
  VARIANT (1)..(17): Xaa = Any Amino Acid
CCXXEWACNPACXTGXA

SEQ ID NO: 13305 - protein, 16 aa, Artificial Sequence
  Synthetically generated peptide
  VARIANT (1)..(16): Xaa = Any Amino Acid
CCXXEWACNPACTXGA

SEQ ID NO: 13306 - protein, 17 aa, Artificial Sequence
  Synthetically generated peptide
  VARIANT (1)..(17): Xaa = Any Amino Acid
CCXXEWACNPACTXXGA

SEQ ID NO: 13307 - protein, 17 aa, Artificial Sequence
  Synthetically generated peptide
  VARIANT (1)..(17): Xaa = Any Amino Acid
CCXXEWACNPACTXGXA

SEQ ID NO: 13308 - protein, 16 aa, Artificial Sequence
  Synthetically generated peptide
  VARIANT (1)..(16): Xaa = Any Amino Acid
CCXXEWACNPACTGXA

SEQ ID NO: 13309 - protein, 17 aa, Artificial Sequence
  Synthetically generated peptide
  VARIANT (1)..(17): Xaa = Any Amino Acid
CCXXEWACNPACTGXXA

SEQ ID NO: 13310 - protein, 15 aa, Artificial Sequence
  Synthetically generated peptide
  VARIANT (1)..(15): Xaa = Any Amino Acid
CCXEXWACNPACTGA

SEQ ID NO: 13311 - protein, 16 aa, Artificial Sequence
  Synthetically generated peptide
  VARIANT (1)..(16): Xaa = Any Amino Acid
CCXEXXWACNPACTGA

SEQ ID NO: 13312 - protein, 17 aa, Artificial Sequence
  Synthetically generated peptide
  VARIANT (1)..(17): Xaa = Any Amino Acid
CCXEXXXWACNPACTGA

SEQ ID NO: 13313 - protein, 17 aa, Artificial Sequence
  Synthetically generated peptide
  VARIANT (1)..(17): Xaa = Any Amino Acid
CCXEXXWXACNPACTGA

SEQ ID NO: 13314 - protein, 17 aa, Artificial Sequence
  Synthetically generated peptide
  VARIANT (1)..(17): Xaa = Any Amino Acid
CCXEXXWACXNPACTGA

SEQ ID NO: 13315 - protein, 17 aa, Artificial Sequence
  Synthetically generated peptide
  VARIANT (1)..(17): Xaa = Any Amino Acid
CCXEXXWACNXPACTGA

SEQ ID NO: 13316 - protein, 17 aa, Artificial Sequence
  Synthetically generated peptide
  VARIANT (1)..(17): Xaa = Any Amino Acid
CCXEXXWACNPXACTGA

SEQ ID NO: 13317 - protein, 17 aa, Artificial Sequence
  Synthetically generated peptide
  VARIANT (1)..(17): Xaa = Any Amino Acid
CCXEXXWACNPAXCTGA

SEQ ID NO: 13318 - protein, 17 aa, Artificial Sequence
  Synthetically generated peptide
  VARIANT (1)..(17): Xaa = Any Amino Acid
CCXEXXWACNPACXTGA

SEQ ID NO: 13319 - protein, 17 aa, Artificial Sequence
  Synthetically generated peptide
  VARIANT (1)..(17): Xaa = Any Amino Acid
CCXEXXWACNPACTXGA

SEQ ID NO: 13320 - protein, 17 aa, Artificial Sequence
  Synthetically generated peptide
  VARIANT (1)..(17): Xaa = Any Amino Acid
CCXEXXWACNPACTGXA

SEQ ID NO: 13321 - protein, 16 aa, Artificial Sequence
  Synthetically generated peptide
  VARIANT (1)..(16): Xaa = Any Amino Acid
CCXEXWXACNPACTGA

SEQ ID NO: 13322 - protein, 17 aa, Artificial Sequence
  Synthetically generated peptide
  VARIANT (1)..(17): Xaa = Any Amino Acid
CCXEXWXXACNPACTGA

SEQ ID NO: 13323 - protein, 17 aa, Artificial Sequence
  Synthetically generated peptide
  VARIANT (1)..(17): Xaa = Any Amino Acid
CCXEXWXACXNPACTGA

SEQ ID NO: 13324 - protein, 17 aa, Artificial Sequence
  Synthetically generated peptide
  VARIANT (1)..(17): Xaa = Any Amino Acid
CCXEXWXACNXPACTGA

SEQ ID NO: 13325 - protein, 17 aa, Artificial Sequence
  Synthetically generated peptide
  VARIANT (1)..(17): Xaa = Any Amino Acid
CCXEXWXACNPXACTGA

SEQ ID NO: 13326 - protein, 17 aa, Artificial Sequence
  Synthetically generated peptide
  VARIANT (1)..(17): Xaa = Any Amino Acid
CCXEXWXACNPAXCTGA

SEQ ID NO: 13327 - protein, 17 aa, Artificial Sequence
  Synthetically generated peptide
  VARIANT (1)..(17): Xaa = Any Amino Acid
CCXEXWXACNPACXTGA

SEQ ID NO: 13328 - protein, 17 aa, Artificial Sequence
  Synthetically generated peptide
  VARIANT (1)..(17): Xaa = Any Amino Acid
CCXEXWXACNPACTXGA

SEQ ID NO: 13329 - protein, 17 aa, Artificial Sequence
  Synthetically generated peptide
  VARIANT (1)..(17): Xaa = Any Amino Acid
CCXEXWXACNPACTGXA

SEQ ID NO: 13330 - protein, 16 aa, Artificial Sequence
  Synthetically generated peptide
  VARIANT (1)..(16): Xaa = Any Amino Acid
CCXEXWACXNPACTGA

SEQ ID NO: 13331 - protein, 17 aa, Artificial Sequence
  Synthetically generated peptide
  VARIANT (1)..(17): Xaa = Any Amino Acid
CCXEXWACXXNPACTGA

SEQ ID NO: 13332 - protein, 17 aa, Artificial Sequence
  Synthetically generated peptide
  VARIANT (1)..(17): Xaa = Any Amino Acid
CCXEXWACXNXPACTGA

SEQ ID NO: 13333 - protein, 17 aa, Artificial Sequence
  Synthetically generated peptide
  VARIANT (1)..(17): Xaa = Any Amino Acid
CCXEXWACXNPXACTGA

SEQ ID NO: 13334 - protein, 17 aa, Artificial Sequence
  Synthetically generated peptide
  VARIANT (1)..(17): Xaa = Any Amino Acid
CCXEXWACXNPAXCTGA

SEQ ID NO: 13335 - protein, 17 aa, Artificial Sequence
  Synthetically generated peptide
  VARIANT (1)..(17): Xaa = Any Amino Acid
CCXEXWACXNPACXTGA

SEQ ID NO: 13336 - protein, 17 aa, Artificial Sequence
  Synthetically generated peptide
  VARIANT (1)..(17): Xaa = Any Amino Acid
CCXEXWACXNPACTXGA

SEQ ID NO: 13337 - protein, 17 aa, Artificial Sequence
  Synthetically generated peptide
  VARIANT (1)..(17): Xaa = Any Amino Acid
CCXEXWACXNPACTGXA

SEQ ID NO: 13338 - protein, 16 aa, Artificial Sequence
  Synthetically generated peptide
  VARIANT (1)..(16): Xaa = Any Amino Acid
CCXEXWACNXPACTGA

SEQ ID NO: 13339 - protein, 17 aa, Artificial Sequence
  Synthetically generated peptide
  VARIANT (1)..(17): Xaa = Any Amino Acid
CCXEXWACNXXPACTGA

SEQ ID NO: 13340 - protein, 17 aa, Artificial Sequence
  Synthetically generated peptide
  VARIANT (1)..(17): Xaa = Any Amino Acid
CCXEXWACNXPXACTGA

SEQ ID NO: 13341 - protein, 17 aa, Artificial Sequence
  Synthetically generated peptide
  VARIANT (1)..(17): Xaa = Any Amino Acid
CCXEXWACNXPAXCTGA

SEQ ID NO: 13342 - protein, 17 aa, Artificial Sequence
  Synthetically generated peptide
  VARIANT (1)..(17): Xaa = Any Amino Acid
CCXEXWACNXPACXTGA

SEQ ID NO: 13343 - protein, 17 aa, Artificial Sequence
  Synthetically generated peptide
  VARIANT (1)..(17): Xaa = Any Amino Acid
CCXEXWACNXPACTXGA

SEQ ID NO: 13344 - protein, 17 aa, Artificial Sequence
  Synthetically generated peptide
  VARIANT (1)..(17): Xaa = Any Amino Acid
CCXEXWACNXPACTGXA

SEQ ID NO: 13345 - protein, 16 aa, Artificial Sequence
  Synthetically generated peptide
  VARIANT (1)..(16): Xaa = Any Amino Acid
CCXEXWACNPXACTGA

SEQ ID NO: 13346 - protein, 17 aa, Artificial Sequence
  Synthetically generated peptide
  VARIANT (1)..(17): Xaa = Any Amino Acid
CCXEXWACNPXXACTGA

SEQ ID NO: 13347 - protein, 17 aa, Artificial Sequence
  Synthetically generated peptide
  VARIANT (1)..(17): Xaa = Any Amino Acid
CCXEXWACNPXAXCTGA

SEQ ID NO: 13348 - protein, 17 aa, Artificial Sequence
  Synthetically generated peptide
  VARIANT (1)..(17): Xaa = Any Amino Acid
CCXEXWACNPXACXTGA

SEQ ID NO: 13349 - protein, 17 aa, Artificial Sequence
  Synthetically generated peptide
  VARIANT (1)..(17): Xaa = Any Amino Acid
CCXEXWACNPXACTXGA

SEQ ID NO: 13350 - protein, 17 aa, Artificial Sequence
  Synthetically generated peptide
  VARIANT (1)..(17): Xaa = Any Amino Acid
CCXEXWACNPXACTGXA

SEQ ID NO: 13351 - protein, 16 aa, Artificial Sequence
  Synthetically generated peptide
  VARIANT (1)..(16): Xaa = Any Amino Acid
CCXEXWACNPAXCTGA

SEQ ID NO: 13352 - protein, 17 aa, Artificial Sequence
  Synthetically generated peptide
  VARIANT (1)..(17): Xaa = Any Amino Acid
CCXEXWACNPAXXCTGA

SEQ ID NO: 13353 - protein, 17 aa, Artificial Sequence
  Synthetically generated peptide
  VARIANT (1)..(17): Xaa = Any Amino Acid
CCXEXWACNPAXCXTGA

SEQ ID NO: 13354 - protein, 17 aa, Artificial Sequence
  Synthetically generated peptide
  VARIANT (1)..(17): Xaa = Any Amino Acid
CCXEXWACNPAXCTXGA

SEQ ID NO: 13355 - protein, 17 aa, Artificial Sequence
  Synthetically generated peptide
  VARIANT (1)..(17): Xaa = Any Amino Acid
CCXEXWACNPAXCTGXA

SEQ ID NO: 13356 - protein, 16 aa, Artificial Sequence
  Synthetically generated peptide
  VARIANT (1)..(16): Xaa = Any Amino Acid
CCXEXWACNPACXTGA

SEQ ID NO: 13357 - protein, 17 aa, Artificial Sequence
  Synthetically generated peptide
  VARIANT (1)..(17): Xaa = Any Amino Acid
CCXEXWACNPACXXTGA

SEQ ID NO: 13358 - protein, 17 aa, Artificial Sequence
  Synthetically generated peptide
  VARIANT (1)..(17): Xaa = Any Amino Acid
CCXEXWACNPACXTXGA

SEQ ID NO: 13359 - protein, 17 aa, Artificial Sequence
  Synthetically generated peptide
  VARIANT (1)..(17): Xaa = Any Amino Acid
CCXEXWACNPACXTGXA

SEQ ID NO: 13360 - protein, 16 aa, Artificial Sequence
  Synthetically generated peptide
  VARIANT (1)..(16): Xaa = Any Amino Acid
CCXEXWACNPACTXGA

SEQ ID NO: 13361 - protein, 17 aa, Artificial Sequence
  Synthetically generated peptide
  VARIANT (1)..(17): Xaa = Any Amino Acid
CCXEXWACNPACTXXGA

SEQ ID NO: 13362 - protein, 17 aa, Artificial Sequence
  Synthetically generated peptide
  VARIANT (1)..(17): Xaa = Any Amino Acid
CCXEXWACNPACTXGXA

SEQ ID NO: 13363 - protein, 16 aa, Artificial Sequence
  Synthetically generated peptide
  VARIANT (1)..(16): Xaa = Any Amino Acid
CCXEXWACNPACTGXA

SEQ ID NO: 13364 - protein, 17 aa, Artificial Sequence
  Synthetically generated peptide
  VARIANT (1)..(17): Xaa = Any Amino Acid
CCXEXWACNPACTGXXA

SEQ ID NO: 13365 - protein, 15 aa, Artificial Sequence
  Synthetically generated peptide
  VARIANT (1)..(15): Xaa = Any Amino Acid
CCXEWXACNPACTGA

SEQ ID NO: 13366 - protein, 16 aa, Artificial Sequence
  Synthetically generated peptide
  VARIANT (1)..(16): Xaa = Any Amino Acid
CCXEWXXACNPACTGA

SEQ ID NO: 13367 - protein, 17 aa, Artificial Sequence
  Synthetically generated peptide
  VARIANT (1)..(17): Xaa = Any Amino Acid
CCXEWXXXACNPACTGA

SEQ ID NO: 13368 - protein, 17 aa, Artificial Sequence
  Synthetically generated peptide
  VARIANT (1)..(17): Xaa = Any Amino Acid
CCXEWXXACXNPACTGA

SEQ ID NO: 13369 - protein, 17 aa, Artificial Sequence
  Synthetically generated peptide
  VARIANT (1)..(17): Xaa = Any Amino Acid
CCXEWXXACNXPACTGA

SEQ ID NO: 13370 - protein, 17 aa, Artificial Sequence
  Synthetically generated peptide
  VARIANT (1)..(17): Xaa = Any Amino Acid
CCXEWXXACNPXACTGA

SEQ ID NO: 13371 - protein, 17 aa, Artificial Sequence
  Synthetically generated peptide
  VARIANT (1)..(17): Xaa = Any Amino Acid
CCXEWXXACNPAXCTGA

SEQ ID NO: 13372 - protein, 17 aa, Artificial Sequence
  Synthetically generated peptide
  VARIANT (1)..(17): Xaa = Any Amino Acid
CCXEWXXACNPACXTGA

SEQ ID NO: 13373 - protein, 17 aa, Artificial Sequence
  Synthetically generated peptide
  VARIANT (1)..(17): Xaa = Any Amino Acid
CCXEWXXACNPACTXGA

SEQ ID NO: 13374 - protein, 17 aa, Artificial Sequence
  Synthetically generated peptide
  VARIANT (1)..(17): Xaa = Any Amino Acid
CCXEWXXACNPACTGXA

SEQ ID NO: 13375 - protein, 16 aa, Artificial Sequence
  Synthetically generated peptide
  VARIANT (1)..(16): Xaa = Any Amino Acid
CCXEWXACXNPACTGA

SEQ ID NO: 13376 - protein, 17 aa, Artificial Sequence
  Synthetically generated peptide
  VARIANT (1)..(17): Xaa = Any Amino Acid
CCXEWXACXXNPACTGA

SEQ ID NO: 13377 - protein, 17 aa, Artificial Sequence
  Synthetically generated peptide
  VARIANT (1)..(17): Xaa = Any Amino Acid
CCXEWXACXNXPACTGA

SEQ ID NO: 13378 - protein, 17 aa, Artificial Sequence
  Synthetically generated peptide
  VARIANT (1)..(17): Xaa = Any Amino Acid
CCXEWXACXNPXACTGA

SEQ ID NO: 13379 - protein, 17 aa, Artificial Sequence
  Synthetically generated peptide
  VARIANT (1)..(17): Xaa = Any Amino Acid
CCXEWXACXNPAXCTGA

SEQ ID NO: 13380 - protein, 17 aa, Artificial Sequence
  Synthetically generated peptide
  VARIANT (1)..(17): Xaa = Any Amino Acid
CCXEWXACXNPACXTGA

SEQ ID NO: 13381 - protein, 17 aa, Artificial Sequence
  Synthetically generated peptide
  VARIANT (1)..(17): Xaa = Any Amino Acid
CCXEWXACXNPACTXGA

SEQ ID NO: 13382 - protein, 17 aa, Artificial Sequence
  Synthetically generated peptide
  VARIANT (1)..(17): Xaa = Any Amino Acid
CCXEWXACXNPACTGXA

SEQ ID NO: 13383 - protein, 16 aa, Artificial Sequence
  Synthetically generated peptide
  VARIANT (1)..(16): Xaa = Any Amino Acid
CCXEWXACNXPACTGA

SEQ ID NO: 13384 - protein, 17 aa, Artificial Sequence
  Synthetically generated peptide
  VARIANT (1)..(17): Xaa = Any Amino Acid
CCXEWXACNXXPACTGA

SEQ ID NO: 13385 - protein, 17 aa, Artificial Sequence
  Synthetically generated peptide
  VARIANT (1)..(17): Xaa = Any Amino Acid
CCXEWXACNXPXACTGA

SEQ ID NO: 13386 - protein, 17 aa, Artificial Sequence
  Synthetically generated peptide
  VARIANT (1)..(17): Xaa = Any Amino Acid
CCXEWXACNXPAXCTGA

SEQ ID NO: 13387 - protein, 17 aa, Artificial Sequence
  Synthetically generated peptide
  VARIANT (1)..(17): Xaa = Any Amino Acid
CCXEWXACNXPACXTGA

SEQ ID NO: 13388 - protein, 17 aa, Artificial Sequence
  Synthetically generated peptide
  VARIANT (1)..(17): Xaa = Any Amino Acid
CCXEWXACNXPACTXGA

SEQ ID NO: 13389 - protein, 17 aa, Artificial Sequence
  Synthetically generated peptide
  VARIANT (1)..(17): Xaa = Any Amino Acid
CCXEWXACNXPACTGXA

SEQ ID NO: 13390 - protein, 16 aa, Artificial Sequence
  Synthetically generated peptide
  VARIANT (1)..(16): Xaa = Any Amino Acid
CCXEWXACNPXACTGA

SEQ ID NO: 13391 - protein, 17 aa, Artificial Sequence
  Synthetically generated peptide
  VARIANT (1)..(17): Xaa = Any Amino Acid
CCXEWXACNPXXACTGA

SEQ ID NO: 13392 - protein, 17 aa, Artificial Sequence
  Synthetically generated peptide
  VARIANT (1)..(17): Xaa = Any Amino Acid
CCXEWXACNPXAXCTGA

SEQ ID NO: 13393 - protein, 17 aa, Artificial Sequence
  Synthetically generated peptide
  VARIANT (1)..(17): Xaa = Any Amino Acid
CCXEWXACNPXACXTGA

SEQ ID NO: 13394 - protein, 17 aa, Artificial Sequence
  Synthetically generated peptide
  VARIANT (1)..(17): Xaa = Any Amino Acid
CCXEWXACNPXACTXGA

SEQ ID NO: 13395 - protein, 17 aa, Artificial Sequence
  Synthetically generated peptide
  VARIANT (1)..(17): Xaa = Any Amino Acid
CCXEWXACNPXACTGXA

SEQ ID NO: 13396 - protein, 16 aa, Artificial Sequence
  Synthetically generated peptide
  VARIANT (1)..(16): Xaa = Any Amino Acid
CCXEWXACNPAXCTGA

SEQ ID NO: 13397 - protein, 17 aa, Artificial Sequence
  Synthetically generated peptide
  VARIANT (1)..(17): Xaa = Any Amino Acid
CCXEWXACNPAXXCTGA

SEQ ID NO: 13398 - protein, 17 aa, Artificial Sequence
  Synthetically generated peptide
  VARIANT (1)..(17): Xaa = Any Amino Acid
CCXEWXACNPAXCXTGA

SEQ ID NO: 13399 - protein, 17 aa, Artificial Sequence
  Synthetically generated peptide
  VARIANT (1)..(17): Xaa = Any Amino Acid
CCXEWXACNPAXCTXGA

SEQ ID NO: 13400 - protein, 17 aa, Artificial Sequence
  Synthetically generated peptide
  VARIANT (1)..(17): Xaa = Any Amino Acid
CCXEWXACNPAXCTGXA

SEQ ID NO: 13401 - protein, 16 aa, Artificial Sequence
  Synthetically generated peptide
  VARIANT (1)..(16): Xaa = Any Amino Acid
CCXEWXACNPACXTGA

SEQ ID NO: 13402 - protein, 17 aa, Artificial Sequence
  Synthetically generated peptide
  VARIANT (1)..(17): Xaa = Any Amino Acid
CCXEWXACNPACXXTGA

SEQ ID NO: 13403 - protein, 17 aa, Artificial Sequence
  Synthetically generated peptide
  VARIANT (1)..(17): Xaa = Any Amino Acid
CCXEWXACNPACXTXGA

SEQ ID NO: 13404 - protein, 17 aa, Artificial Sequence
  Synthetically generated peptide
  VARIANT (1)..(17): Xaa = Any Amino Acid
CCXEWXACNPACXTGXA

SEQ ID NO: 13405 - protein, 16 aa, Artificial Sequence
  Synthetically generated peptide
  VARIANT (1)..(16): Xaa = Any Amino Acid
CCXEWXACNPACTXGA

SEQ ID NO: 13406 - protein, 17 aa, Artificial Sequence
  Synthetically generated peptide
  VARIANT (1)..(17): Xaa = Any Amino Acid
CCXEWXACNPACTXXGA

SEQ ID NO: 13407 - protein, 17 aa, Artificial Sequence
  Synthetically generated peptide
  VARIANT (1)..(17): Xaa = Any Amino Acid
CCXEWXACNPACTXGXA

SEQ ID NO: 13408 - protein, 16 aa, Artificial Sequence
  Synthetically generated peptide
  VARIANT (1)..(16): Xaa = Any Amino Acid
CCXEWXACNPACTGXA

SEQ ID NO: 13409 - protein, 17 aa, Artificial Sequence
  Synthetically generated peptide
  VARIANT (1)..(17): Xaa = Any Amino Acid
CCXEWXACNPACTGXXA

SEQ ID NO: 13410 - protein, 15 aa, Artificial Sequence
  Synthetically generated peptide
  VARIANT (1)..(15): Xaa = Any Amino Acid
CCXEWACXNPACTGA

SEQ ID NO: 13411 - protein, 16 aa, Artificial Sequence
  Synthetically generated peptide
  VARIANT (1)..(16): Xaa = Any Amino Acid
CCXEWACXXNPACTGA

SEQ ID NO: 13412 - protein, 17 aa, Artificial Sequence
  Synthetically generated peptide
  VARIANT (1)..(17): Xaa = Any Amino Acid
CCXEWACXXXNPACTGA

SEQ ID NO: 13413 - protein, 17 aa, Artificial Sequence
  Synthetically generated peptide
  VARIANT (1)..(17): Xaa = Any Amino Acid
CCXEWACXXNXPACTGA

SEQ ID NO: 13414 - protein, 17 aa, Artificial Sequence
  Synthetically generated peptide
  VARIANT (1)..(17): Xaa = Any Amino Acid
CCXEWACXXNPXACTGA

SEQ ID NO: 13415 - protein, 17 aa, Artificial Sequence
  Synthetically generated peptide
  VARIANT (1)..(17): Xaa = Any Amino Acid
CCXEWACXXNPAXCTGA

SEQ ID NO: 13416 - protein, 17 aa, Artificial Sequence
  Synthetically generated peptide
  VARIANT (1)..(17): Xaa = Any Amino Acid
CCXEWACXXNPACXTGA

SEQ ID NO: 13417 - protein, 17 aa, Artificial Sequence
  Synthetically generated peptide
  VARIANT (1)..(17): Xaa = Any Amino Acid
CCXEWACXXNPACTXGA

SEQ ID NO: 13418 - protein, 17 aa, Artificial Sequence
  Synthetically generated peptide
  VARIANT (1)..(17): Xaa = Any Amino Acid
CCXEWACXXNPACTGXA

SEQ ID NO: 13419 - protein, 16 aa, Artificial Sequence
  Synthetically generated peptide
  VARIANT (1)..(16): Xaa = Any Amino Acid
CCXEWACXNXPACTGA

SEQ ID NO: 13420 - protein, 17 aa, Artificial Sequence
  Synthetically generated peptide
  VARIANT (1)..(17): Xaa = Any Amino Acid
CCXEWACXNXXPACTGA

SEQ ID NO: 13421 - protein, 17 aa, Artificial Sequence
  Synthetically generated peptide
  VARIANT (1)..(17): Xaa = Any Amino Acid
CCXEWACXNXPXACTGA

SEQ ID NO: 13422 - protein, 17 aa, Artificial Sequence
  Synthetically generated peptide
  VARIANT (1)..(17): Xaa = Any Amino Acid
CCXEWACXNXPAXCTGA

SEQ ID NO: 13423 - protein, 17 aa, Artificial Sequence
  Synthetically generated peptide
  VARIANT (1)..(17): Xaa = Any Amino Acid
CCXEWACXNXPACXTGA

SEQ ID NO: 13424 - protein, 17 aa, Artificial Sequence
  Synthetically generated peptide
  VARIANT (1)..(17): Xaa = Any Amino Acid
CCXEWACXNXPACTXGA

SEQ ID NO: 13425 - protein, 17 aa, Artificial Sequence
  Synthetically generated peptide
  VARIANT (1)..(17): Xaa = Any Amino Acid
CCXEWACXNXPACTGXA

SEQ ID NO: 13426 - protein, 16 aa, Artificial Sequence
  Synthetically generated peptide
  VARIANT (1)..(16): Xaa = Any Amino Acid
CCXEWACXNPXACTGA

SEQ ID NO: 13427 - protein, 17 aa, Artificial Sequence
  Synthetically generated peptide
  VARIANT (1)..(17): Xaa = Any Amino Acid
CCXEWACXNPXXACTGA

SEQ ID NO: 13428 - protein, 17 aa, Artificial Sequence
  Synthetically generated peptide
  VARIANT (1)..(17): Xaa = Any Amino Acid
CCXEWACXNPXAXCTGA

SEQ ID NO: 13429 - protein, 17 aa, Artificial Sequence
  Synthetically generated peptide
  VARIANT (1)..(17): Xaa = Any Amino Acid
CCXEWACXNPXACXTGA

SEQ ID NO: 13430 - protein, 17 aa, Artificial Sequence
  Synthetically generated peptide
  VARIANT (1)..(17): Xaa = Any Amino Acid
CCXEWACXNPXACTXGA

SEQ ID NO: 13431 - protein, 17 aa, Artificial Sequence
  Synthetically generated peptide
  VARIANT (1)..(17): Xaa = Any Amino Acid
CCXEWACXNPXACTGXA

SEQ ID NO: 13432 - protein, 16 aa, Artificial Sequence
  Synthetically generated peptide
  VARIANT (1)..(16): Xaa = Any Amino Acid
CCXEWACXNPAXCTGA

SEQ ID NO: 13433 - protein, 17 aa, Artificial Sequence
  Synthetically generated peptide
  VARIANT (1)..(17): Xaa = Any Amino Acid
CCXEWACXNPAXXCTGA

SEQ ID NO: 13434 - protein, 17 aa, Artificial Sequence
  Synthetically generated peptide
  VARIANT (1)..(17): Xaa = Any Amino Acid
CCXEWACXNPAXCXTGA

SEQ ID NO: 13435 - protein, 17 aa, Artificial Sequence
  Synthetically generated peptide
  VARIANT (1)..(17): Xaa = Any Amino Acid
CCXEWACXNPAXCTXGA

SEQ ID NO: 13436 - protein, 17 aa, Artificial Sequence
  Synthetically generated peptide
  VARIANT (1)..(17): Xaa = Any Amino Acid
CCXEWACXNPAXCTGXA

SEQ ID NO: 13437 - protein, 16 aa, Artificial Sequence
  Synthetically generated peptide
  VARIANT (1)..(16): Xaa = Any Amino Acid
CCXEWACXNPACXTGA

SEQ ID NO: 13438 - protein, 17 aa, Artificial Sequence
  Synthetically generated peptide
  VARIANT (1)..(17): Xaa = Any Amino Acid
CCXEWACXNPACXXTGA

SEQ ID NO: 13439 - protein, 17 aa, Artificial Sequence
  Synthetically generated peptide
  VARIANT (1)..(17): Xaa = Any Amino Acid
CCXEWACXNPACXTXGA

SEQ ID NO: 13440 - protein, 17 aa, Artificial Sequence
  Synthetically generated peptide
  VARIANT (1)..(17): Xaa = Any Amino Acid
CCXEWACXNPACXTGXA

SEQ ID NO: 13441 - protein, 16 aa, Artificial Sequence
  Synthetically generated peptide
  VARIANT (1)..(16): Xaa = Any Amino Acid
CCXEWACXNPACTXGA

SEQ ID NO: 13442 - protein, 17 aa, Artificial Sequence
  Synthetically generated peptide
  VARIANT (1)..(17): Xaa = Any Amino Acid
CCXEWACXNPACTXXGA

SEQ ID NO: 13443 - protein, 17 aa, Artificial Sequence
  Synthetically generated peptide
  VARIANT (1)..(17): Xaa = Any Amino Acid
CCXEWACXNPACTXGXA

SEQ ID NO: 13444 - protein, 16 aa, Artificial Sequence
  Synthetically generated peptide
  VARIANT (1)..(16): Xaa = Any Amino Acid
CCXEWACXNPACTGXA

SEQ ID NO: 13445 - protein, 17 aa, Artificial Sequence
  Synthetically generated peptide
  VARIANT (1)..(17): Xaa = Any Amino Acid
CCXEWACXNPACTGXXA

SEQ ID NO: 13446 - protein, 15 aa, Artificial Sequence
  Synthetically generated peptide
  VARIANT (1)..(15): Xaa = Any Amino Acid
CCXEWACNXPACTGA

SEQ ID NO: 13447 - protein, 16 aa, Artificial Sequence
  Synthetically generated peptide
  VARIANT (1)..(16): Xaa = Any Amino Acid
CCXEWACNXXPACTGA

SEQ ID NO: 13448 - protein, 17 aa, Artificial Sequence
  Synthetically generated peptide
  VARIANT (1)..(17): Xaa = Any Amino Acid
CCXEWACNXXXPACTGA

SEQ ID NO: 13449 - protein, 17 aa, Artificial Sequence
  Synthetically generated peptide
  VARIANT (1)..(17): Xaa = Any Amino Acid
CCXEWACNXXPXACTGA

SEQ ID NO: 13450 - protein, 17 aa, Artificial Sequence
  Synthetically generated peptide
  VARIANT (1)..(17): Xaa = Any Amino Acid
CCXEWACNXXPAXCTGA

SEQ ID NO: 13451 - protein, 17 aa, Artificial Sequence
  Synthetically generated peptide
  VARIANT (1)..(17): Xaa = Any Amino Acid
CCXEWACNXXPACXTGA

SEQ ID NO: 13452 - protein, 17 aa, Artificial Sequence
  Synthetically generated peptide
  VARIANT (1)..(17): Xaa = Any Amino Acid
CCXEWACNXXPACTXGA

SEQ ID NO: 13453 - protein, 17 aa, Artificial Sequence
  Synthetically generated peptide
  VARIANT (1)..(17): Xaa = Any Amino Acid
CCXEWACNXXPACTGXA

SEQ ID NO: 13454 - protein, 16 aa, Artificial Sequence
  Synthetically generated peptide
  VARIANT (1)..(16): Xaa = Any Amino Acid
CCXEWACNXPXACTGA

SEQ ID NO: 13455 - protein, 17 aa, Artificial Sequence
  Synthetically generated peptide
  VARIANT (1)..(17): Xaa = Any Amino Acid
CCXEWACNXPXXACTGA

SEQ ID NO: 13456 - protein, 17 aa, Artificial Sequence
  Synthetically generated peptide
  VARIANT (1)..(17): Xaa = Any Amino Acid
CCXEWACNXPXAXCTGA

SEQ ID NO: 13457 - protein, 17 aa, Artificial Sequence
  Synthetically generated peptide
  VARIANT (1)..(17): Xaa = Any Amino Acid
CCXEWACNXPXACXTGA

SEQ ID NO: 13458 - protein, 17 aa, Artificial Sequence
  Synthetically generated peptide
  VARIANT (1)..(17): Xaa = Any Amino Acid
CCXEWACNXPXACTXGA

SEQ ID NO: 13459 - protein, 17 aa, Artificial Sequence
  Synthetically generated peptide
  VARIANT (1)..(17): Xaa = Any Amino Acid
CCXEWACNXPXACTGXA

SEQ ID NO: 13460 - protein, 16 aa, Artificial Sequence
  Synthetically generated peptide
  VARIANT (1)..(16): Xaa = Any Amino Acid
CCXEWACNXPAXCTGA

SEQ ID NO: 13461 - protein, 17 aa, Artificial Sequence
  Synthetically generated peptide
  VARIANT (1)..(17): Xaa = Any Amino Acid
CCXEWACNXPAXXCTGA

SEQ ID NO: 13462 - protein, 17 aa, Artificial Sequence
  Synthetically generated peptide
  VARIANT (1)..(17): Xaa = Any Amino Acid
CCXEWACNXPAXCXTGA

SEQ ID NO: 13463 - protein, 17 aa, Artificial Sequence
  Synthetically generated peptide
  VARIANT (1)..(17): Xaa = Any Amino Acid
CCXEWACNXPAXCTXGA

SEQ ID NO: 13464 - protein, 17 aa, Artificial Sequence
  Synthetically generated peptide
  VARIANT (1)..(17): Xaa = Any Amino Acid
CCXEWACNXPAXCTGXA

SEQ ID NO: 13465 - protein, 16 aa, Artificial Sequence
  Synthetically generated peptide
  VARIANT (1)..(16): Xaa = Any Amino Acid
CCXEWACNXPACXTGA

SEQ ID NO: 13466 - protein, 17 aa, Artificial Sequence
  Synthetically generated peptide
  VARIANT (1)..(17): Xaa = Any Amino Acid
CCXEWACNXPACXXTGA

SEQ ID NO: 13467 - protein, 17 aa, Artificial Sequence
  Synthetically generated peptide
  VARIANT (1)..(17): Xaa = Any Amino Acid
CCXEWACNXPACXTXGA

SEQ ID NO: 13468 - protein, 17 aa, Artificial Sequence
  Synthetically generated peptide
  VARIANT (1)..(17): Xaa = Any Amino Acid
CCXEWACNXPACXTGXA

SEQ ID NO: 13469 - protein, 16 aa, Artificial Sequence
  Synthetically generated peptide
  VARIANT (1)..(16): Xaa = Any Amino Acid
CCXEWACNXPACTXGA

SEQ ID NO: 13470 - protein, 17 aa, Artificial Sequence
  Synthetically generated peptide
  VARIANT (1)..(17): Xaa = Any Amino Acid
CCXEWACNXPACTXXGA

SEQ ID NO: 13471 - protein, 17 aa, Artificial Sequence
  Synthetically generated peptide
  VARIANT (1)..(17): Xaa = Any Amino Acid
CCXEWACNXPACTXGXA

SEQ ID NO: 13472 - protein, 16 aa, Artificial Sequence
  Synthetically generated peptide
  VARIANT (1)..(16): Xaa = Any Amino Acid
CCXEWACNXPACTGXA

SEQ ID NO: 13473 - protein, 17 aa, Artificial Sequence
  Synthetically generated peptide
  VARIANT (1)..(17): Xaa = Any Amino Acid
CCXEWACNXPACTGXXA

SEQ ID NO: 13474 - protein, 15 aa, Artificial Sequence
  Synthetically generated peptide
  VARIANT (1)..(15): Xaa = Any Amino Acid
CCXEWACNPXACTGA

SEQ ID NO: 13475 - protein, 16 aa, Artificial Sequence
  Synthetically generated peptide
  VARIANT (1)..(16): Xaa = Any Amino Acid
CCXEWACNPXXACTGA

SEQ ID NO: 13476 - protein, 17 aa, Artificial Sequence
  Synthetically generated peptide
  VARIANT (1)..(17): Xaa = Any Amino Acid
CCXEWACNPXXXACTGA

SEQ ID NO: 13477 - protein, 17 aa, Artificial Sequence
  Synthetically generated peptide
  VARIANT (1)..(17): Xaa = Any Amino Acid
CCXEWACNPXXAXCTGA

SEQ ID NO: 13478 - protein, 17 aa, Artificial Sequence
  Synthetically generated peptide
  VARIANT (1)..(17): Xaa = Any Amino Acid
CCXEWACNPXXACXTGA

SEQ ID NO: 13479 - protein, 17 aa, Artificial Sequence
  Synthetically generated peptide
  VARIANT (1)..(17): Xaa = Any Amino Acid
CCXEWACNPXXACTXGA

SEQ ID NO: 13480 - protein, 17 aa, Artificial Sequence
  Synthetically generated peptide
  VARIANT (1)..(17): Xaa = Any Amino Acid
CCXEWACNPXXACTGXA

SEQ ID NO: 13481 - protein, 16 aa, Artificial Sequence
  Synthetically generated peptide
  VARIANT (1)..(16): Xaa = Any Amino Acid
CCXEWACNPXAXCTGA

SEQ ID NO: 13482 - protein, 17 aa, Artificial Sequence
  Synthetically generated peptide
  VARIANT (1)..(17): Xaa = Any Amino Acid
CCXEWACNPXAXXCTGA

SEQ ID NO: 13483 - protein, 17 aa, Artificial Sequence
  Synthetically generated peptide
  VARIANT (1)..(17): Xaa = Any Amino Acid
CCXEWACNPXAXCXTGA

SEQ ID NO: 13484 - protein, 17 aa, Artificial Sequence
  Synthetically generated peptide
  VARIANT (1)..(17): Xaa = Any Amino Acid
CCXEWACNPXAXCTXGA

SEQ ID NO: 13485 - protein, 17 aa, Artificial Sequence
  Synthetically generated peptide
  VARIANT (1)..(17): Xaa = Any Amino Acid
CCXEWACNPXAXCTGXA

SEQ ID NO: 13486 - protein, 16 aa, Artificial Sequence
  Synthetically generated peptide
  VARIANT (1)..(16): Xaa = Any Amino Acid
CCXEWACNPXACXTGA

SEQ ID NO: 13487 - protein, 17 aa, Artificial Sequence
  Synthetically generated peptide
  VARIANT (1)..(17): Xaa = Any Amino Acid
CCXEWACNPXACXXTGA

SEQ ID NO: 13488 - protein, 17 aa, Artificial Sequence
  Synthetically generated peptide
  VARIANT (1)..(17): Xaa = Any Amino Acid
CCXEWACNPXACXTXGA

SEQ ID NO: 13489 - protein, 17 aa, Artificial Sequence
  Synthetically generated peptide
  VARIANT (1)..(17): Xaa = Any Amino Acid
CCXEWACNPXACXTGXA

SEQ ID NO: 13490 - protein, 16 aa, Artificial Sequence
  Synthetically generated peptide
  VARIANT (1)..(16): Xaa = Any Amino Acid
CCXEWACNPXACTXGA

SEQ ID NO: 13491 - protein, 17 aa, Artificial Sequence
  Synthetically generated peptide
  VARIANT (1)..(17): Xaa = Any Amino Acid
CCXEWACNPXACTXXGA

SEQ ID NO: 13492 - protein, 17 aa, Artificial Sequence
  Synthetically generated peptide
  VARIANT (1)..(17): Xaa = Any Amino Acid
CCXEWACNPXACTXGXA

SEQ ID NO: 13493 - protein, 16 aa, Artificial Sequence
  Synthetically generated peptide
  VARIANT (1)..(16): Xaa = Any Amino Acid
CCXEWACNPXACTGXA

SEQ ID NO: 13494 - protein, 17 aa, Artificial Sequence
  Synthetically generated peptide
  VARIANT (1)..(17): Xaa = Any Amino Acid
CCXEWACNPXACTGXXA

SEQ ID NO: 13495 - protein, 15 aa, Artificial Sequence
  Synthetically generated peptide
  VARIANT (1)..(15): Xaa = Any Amino Acid
CCXEWACNPAXCTGA

SEQ ID NO: 13496 - protein, 16 aa, Artificial Sequence
  Synthetically generated peptide
  VARIANT (1)..(16): Xaa = Any Amino Acid
CCXEWACNPAXXCTGA

SEQ ID NO: 13497 - protein, 17 aa, Artificial Sequence
  Synthetically generated peptide
  VARIANT (1)..(17): Xaa = Any Amino Acid
CCXEWACNPAXXXCTGA

SEQ ID NO: 13498 - protein, 17 aa, Artificial Sequence
  Synthetically generated peptide
  VARIANT (1)..(17): Xaa = Any Amino Acid
CCXEWACNPAXXCXTGA

SEQ ID NO: 13499 - protein, 17 aa, Artificial Sequence
  Synthetically generated peptide
  VARIANT (1)..(17): Xaa = Any Amino Acid
CCXEWACNPAXXCTXGA

SEQ ID NO: 13500 - protein, 17 aa, Artificial Sequence
  Synthetically generated peptide
  VARIANT (1)..(17): Xaa = Any Amino Acid
CCXEWACNPAXXCTGXA

SEQ ID NO: 13501 - protein, 16 aa, Artificial Sequence
  Synthetically generated peptide
  VARIANT (1)..(16): Xaa = Any Amino Acid
CCXEWACNPAXCXTGA

SEQ ID NO: 13502 - protein, 17 aa, Artificial Sequence
  Synthetically generated peptide
  VARIANT (1)..(17): Xaa = Any Amino Acid
CCXEWACNPAXCXXTGA

SEQ ID NO: 13503 - protein, 17 aa, Artificial Sequence
  Synthetically generated peptide
  VARIANT (1)..(17): Xaa = Any Amino Acid
CCXEWACNPAXCXTXGA

SEQ ID NO: 13504 - protein, 17 aa, Artificial Sequence
  Synthetically generated peptide
  VARIANT (1)..(17): Xaa = Any Amino Acid
CCXEWACNPAXCXTGXA

SEQ ID NO: 13505 - protein, 16 aa, Artificial Sequence
  Synthetically generated peptide
  VARIANT (1)..(16): Xaa = Any Amino Acid
CCXEWACNPAXCTXGA

SEQ ID NO: 13506 - protein, 17 aa, Artificial Sequence
  Synthetically generated peptide
  VARIANT (1)..(17): Xaa = Any Amino Acid
CCXEWACNPAXCTXXGA

SEQ ID NO: 13507 - protein, 17 aa, Artificial Sequence
  Synthetically generated peptide
  VARIANT (1)..(17): Xaa = Any Amino Acid
CCXEWACNPAXCTXGXA

SEQ ID NO: 13508 - protein, 16 aa, Artificial Sequence
  Synthetically generated peptide
  VARIANT (1)..(16): Xaa = Any Amino Acid
CCXEWACNPAXCTGXA

SEQ ID NO: 13509 - protein, 17 aa, Artificial Sequence
  Synthetically generated peptide
  VARIANT (1)..(17): Xaa = Any Amino Acid
CCXEWACNPAXCTGXXA

SEQ ID NO: 13510 - protein, 15 aa, Artificial Sequence
  Synthetically generated peptide
  VARIANT (1)..(15): Xaa = Any Amino Acid
CCXEWACNPACXTGA

SEQ ID NO: 13511 - protein, 16 aa, Artificial Sequence
  Synthetically generated peptide
  VARIANT (1)..(16): Xaa = Any Amino Acid
CCXEWACNPACXXTGA

SEQ ID NO: 13512 - protein, 17 aa, Artificial Sequence
  Synthetically generated peptide
  VARIANT (1)..(17): Xaa = Any Amino Acid
CCXEWACNPACXXXTGA

SEQ ID NO: 13513 - protein, 17 aa, Artificial Sequence
  Synthetically generated peptide
  VARIANT (1)..(17): Xaa = Any Amino Acid
CCXEWACNPACXXTXGA

SEQ ID NO: 13514 - protein, 17 aa, Artificial Sequence
  Synthetically generated peptide
  VARIANT (1)..(17): Xaa = Any Amino Acid
CCXEWACNPACXXTGXA

SEQ ID NO: 13515 - protein, 16 aa, Artificial Sequence
  Synthetically generated peptide
  VARIANT (1)..(16): Xaa = Any Amino Acid
CCXEWACNPACXTXGA

SEQ ID NO: 13516 - protein, 17 aa, Artificial Sequence
  Synthetically generated peptide
  VARIANT (1)..(17): Xaa = Any Amino Acid
CCXEWACNPACXTXXGA

SEQ ID NO: 13517 - protein, 17 aa, Artificial Sequence
  Synthetically generated peptide
  VARIANT (1)..(17): Xaa = Any Amino Acid
CCXEWACNPACXTXGXA

SEQ ID NO: 13518 - protein, 16 aa, Artificial Sequence
  Synthetically generated peptide
  VARIANT (1)..(16): Xaa = Any Amino Acid
CCXEWACNPACXTGXA

SEQ ID NO: 13519 - protein, 17 aa, Artificial Sequence
  Synthetically generated peptide
  VARIANT (1)..(17): Xaa = Any Amino Acid
CCXEWACNPACXTGXXA

SEQ ID NO: 13520 - protein, 15 aa, Artificial Sequence
  Synthetically generated peptide
  VARIANT (1)..(15): Xaa = Any Amino Acid
CCXEWACNPACTXGA

SEQ ID NO: 13521 - protein, 16 aa, Artificial Sequence
  Synthetically generated peptide
  VARIANT (1)..(16): Xaa = Any Amino Acid
CCXEWACNPACTXXGA

SEQ ID NO: 13522 - protein, 17 aa, Artificial Sequence
  Synthetically generated peptide
  VARIANT (1)..(17): Xaa = Any Amino Acid
CCXEWACNPACTXXXGA

SEQ ID NO: 13523 - protein, 17 aa, Artificial Sequence
  Synthetically generated peptide
  VARIANT (1)..(17): Xaa = Any Amino Acid
CCXEWACNPACTXXGXA

SEQ ID NO: 13524 - protein, 16 aa, Artificial Sequence
  Synthetically generated peptide
  VARIANT (1)..(16): Xaa = Any Amino Acid
CCXEWACNPACTXGXA

SEQ ID NO: 13525 - protein, 17 aa, Artificial Sequence
  Synthetically generated peptide
  VARIANT (1)..(17): Xaa = Any Amino Acid
CCXEWACNPACTXGXXA

SEQ ID NO: 13526 - protein, 15 aa, Artificial Sequence
  Synthetically generated peptide
  VARIANT (1)..(15): Xaa = Any Amino Acid
CCXEWACNPACTGXA

SEQ ID NO: 13527 - protein, 16 aa, Artificial Sequence
  Synthetically generated peptide
  VARIANT (1)..(16): Xaa = Any Amino Acid
CCXEWACNPACTGXXA

SEQ ID NO: 13528 - protein, 17 aa, Artificial Sequence
  Synthetically generated peptide
  VARIANT (1)..(17): Xaa = Any Amino Acid
CCXEWACNPACTGXXXA

SEQ ID NO: 13529 - protein, 14 aa, Artificial Sequence
  Synthetically generated peptide
  VARIANT (1)..(14): Xaa = Any Amino Acid
CCEXWACNPACTGA

SEQ ID NO: 13530 - protein, 15 aa, Artificial Sequence
  Synthetically generated peptide
  VARIANT (1)..(15): Xaa = Any Amino Acid
CCEXXWACNPACTGA

SEQ ID NO: 13531 - protein, 16 aa, Artificial Sequence
  Synthetically generated peptide
  VARIANT (1)..(16): Xaa = Any Amino Acid
CCEXXXWACNPACTGA

SEQ ID NO: 13532 - protein, 17 aa, Artificial Sequence
  Synthetically generated peptide
  VARIANT (1)..(17): Xaa = Any Amino Acid
CCEXXXXWACNPACTGA

SEQ ID NO: 13533 - protein, 17 aa, Artificial Sequence
  Synthetically generated peptide
  VARIANT (1)..(17): Xaa = Any Amino Acid
CCEXXXWXACNPACTGA

SEQ ID NO: 13534 - protein, 17 aa, Artificial Sequence
  Synthetically generated peptide
  VARIANT (1)..(17): Xaa = Any Amino Acid
CCEXXXWACXNPACTGA

SEQ ID NO: 13535 - protein, 17 aa, Artificial Sequence
  Synthetically generated peptide
  VARIANT (1)..(17): Xaa = Any Amino Acid
CCEXXXWACNXPACTGA

SEQ ID NO: 13536 - protein, 17 aa, Artificial Sequence
  Synthetically generated peptide
  VARIANT (1)..(17): Xaa = Any Amino Acid
CCEXXXWACNPXACTGA

SEQ ID NO: 13537 - protein, 17 aa, Artificial Sequence
  Synthetically generated peptide
  VARIANT (1)..(17): Xaa = Any Amino Acid
CCEXXXWACNPAXCTGA

SEQ ID NO: 13538 - protein, 17 aa, Artificial Sequence
  Synthetically generated peptide
  VARIANT (1)..(17): Xaa = Any Amino Acid
CCEXXXWACNPACXTGA

SEQ ID NO: 13539 - protein, 17 aa, Artificial Sequence
  Synthetically generated peptide
  VARIANT (1)..(17): Xaa = Any Amino Acid
CCEXXXWACNPACTXGA

SEQ ID NO: 13540 - protein, 17 aa, Artificial Sequence
  Synthetically generated peptide
  VARIANT (1)..(17): Xaa = Any Amino Acid
CCEXXXWACNPACTGXA

SEQ ID NO: 13541 - protein, 16 aa, Artificial Sequence
  Synthetically generated peptide
  VARIANT (1)..(16): Xaa = Any Amino Acid
CCEXXWXACNPACTGA

SEQ ID NO: 13542 - protein, 17 aa, Artificial Sequence
  Synthetically generated peptide
  VARIANT (1)..(17): Xaa = Any Amino Acid
CCEXXWXXACNPACTGA

SEQ ID NO: 13543 - protein, 17 aa, Artificial Sequence
  Synthetically generated peptide
  VARIANT (1)..(17): Xaa = Any Amino Acid
CCEXXWXACXNPACTGA

SEQ ID NO: 13544 - protein, 17 aa, Artificial Sequence
  Synthetically generated peptide
  VARIANT (1)..(17): Xaa = Any Amino Acid
CCEXXWXACNXPACTGA

SEQ ID NO: 13545 - protein, 17 aa, Artificial Sequence
  Synthetically generated peptide
  VARIANT (1)..(17): Xaa = Any Amino Acid
CCEXXWXACNPXACTGA

SEQ ID NO: 13546 - protein, 17 aa, Artificial Sequence
  Synthetically generated peptide
  VARIANT (1)..(17): Xaa = Any Amino Acid
CCEXXWXACNPAXCTGA

SEQ ID NO: 13547 - protein, 17 aa, Artificial Sequence
  Synthetically generated peptide
  VARIANT (1)..(17): Xaa = Any Amino Acid
CCEXXWXACNPACXTGA

SEQ ID NO: 13548 - protein, 17 aa, Artificial Sequence
  Synthetically generated peptide
  VARIANT (1)..(17): Xaa = Any Amino Acid
CCEXXWXACNPACTXGA

SEQ ID NO: 13549 - protein, 17 aa, Artificial Sequence
  Synthetically generated peptide
  VARIANT (1)..(17): Xaa = Any Amino Acid
CCEXXWXACNPACTGXA

SEQ ID NO: 13550 - protein, 16 aa, Artificial Sequence
  Synthetically generated peptide
  VARIANT (1)..(16): Xaa = Any Amino Acid
CCEXXWACXNPACTGA

SEQ ID NO: 13551 - protein, 17 aa, Artificial Sequence
  Synthetically generated peptide
  VARIANT (1)..(17): Xaa = Any Amino Acid
CCEXXWACXXNPACTGA

SEQ ID NO: 13552 - protein, 17 aa, Artificial Sequence
  Synthetically generated peptide
  VARIANT (1)..(17): Xaa = Any Amino Acid
CCEXXWACXNXPACTGA

SEQ ID NO: 13553 - protein, 17 aa, Artificial Sequence
  Synthetically generated peptide
  VARIANT (1)..(17): Xaa = Any Amino Acid
CCEXXWACXNPXACTGA

SEQ ID NO: 13554 - protein, 17 aa, Artificial Sequence
  Synthetically generated peptide
  VARIANT (1)..(17): Xaa = Any Amino Acid
CCEXXWACXNPAXCTGA

SEQ ID NO: 13555 - protein, 17 aa, Artificial Sequence
  Synthetically generated peptide
  VARIANT (1)..(17): Xaa = Any Amino Acid
CCEXXWACXNPACXTGA

SEQ ID NO: 13556 - protein, 17 aa, Artificial Sequence
  Synthetically generated peptide
  VARIANT (1)..(17): Xaa = Any Amino Acid
CCEXXWACXNPACTXGA

SEQ ID NO: 13557 - protein, 17 aa, Artificial Sequence
  Synthetically generated peptide
  VARIANT (1)..(17): Xaa = Any Amino Acid
CCEXXWACXNPACTGXA

SEQ ID NO: 13558 - protein, 16 aa, Artificial Sequence
  Synthetically generated peptide
  VARIANT (1)..(16): Xaa = Any Amino Acid
CCEXXWACNXPACTGA

SEQ ID NO: 13559 - protein, 17 aa, Artificial Sequence
  Synthetically generated peptide
  VARIANT (1)..(17): Xaa = Any Amino Acid
CCEXXWACNXXPACTGA

SEQ ID NO: 13560 - protein, 17 aa, Artificial Sequence
  Synthetically generated peptide
  VARIANT (1)..(17): Xaa = Any Amino Acid
CCEXXWACNXPXACTGA

SEQ ID NO: 13561 - protein, 17 aa, Artificial Sequence
  Synthetically generated peptide
  VARIANT (1)..(17): Xaa = Any Amino Acid
CCEXXWACNXPAXCTGA

SEQ ID NO: 13562 - protein, 17 aa, Artificial Sequence
  Synthetically generated peptide
  VARIANT (1)..(17): Xaa = Any Amino Acid
CCEXXWACNXPACXTGA

SEQ ID NO: 13563 - protein, 17 aa, Artificial Sequence
  Synthetically generated peptide
  VARIANT (1)..(17): Xaa = Any Amino Acid
CCEXXWACNXPACTXGA

SEQ ID NO: 13564 - protein, 17 aa, Artificial Sequence
  Synthetically generated peptide
  VARIANT (1)..(17): Xaa = Any Amino Acid
CCEXXWACNXPACTGXA

SEQ ID NO: 13565 - protein, 16 aa, Artificial Sequence
  Synthetically generated peptide
  VARIANT (1)..(16): Xaa = Any Amino Acid
CCEXXWACNPXACTGA

SEQ ID NO: 13566 - protein, 17 aa, Artificial Sequence
  Synthetically generated peptide
  VARIANT (1)..(17): Xaa = Any Amino Acid
CCEXXWACNPXXACTGA

SEQ ID NO: 13567 - protein, 17 aa, Artificial Sequence
  Synthetically generated peptide
  VARIANT (1)..(17): Xaa = Any Amino Acid
CCEXXWACNPXAXCTGA

SEQ ID NO: 13568 - protein, 17 aa, Artificial Sequence
  Synthetically generated peptide
  VARIANT (1)..(17): Xaa = Any Amino Acid
CCEXXWACNPXACXTGA

SEQ ID NO: 13569 - protein, 17 aa, Artificial Sequence
  Synthetically generated peptide
  VARIANT (1)..(17): Xaa = Any Amino Acid
CCEXXWACNPXACTXGA

SEQ ID NO: 13570 - protein, 17 aa, Artificial Sequence
  Synthetically generated peptide
  VARIANT (1)..(17): Xaa = Any Amino Acid
CCEXXWACNPXACTGXA

SEQ ID NO: 13571 - protein, 16 aa, Artificial Sequence
  Synthetically generated peptide
  VARIANT (1)..(16): Xaa = Any Amino Acid
CCEXXWACNPAXCTGA

SEQ ID NO: 13572 - protein, 17 aa, Artificial Sequence
  Synthetically generated peptide
  VARIANT (1)..(17): Xaa = Any Amino Acid
CCEXXWACNPAXXCTGA

SEQ ID NO: 13573 - protein, 17 aa, Artificial Sequence
  Synthetically generated peptide
  VARIANT (1)..(17): Xaa = Any Amino Acid
CCEXXWACNPAXCXTGA

SEQ ID NO: 13574 - protein, 17 aa, Artificial Sequence
  Synthetically generated peptide
  VARIANT (1)..(17): Xaa = Any Amino Acid
CCEXXWACNPAXCTXGA

SEQ ID NO: 13575 - protein, 17 aa, Artificial Sequence
  Synthetically generated peptide
  VARIANT (1)..(17): Xaa = Any Amino Acid
CCEXXWACNPAXCTGXA

SEQ ID NO: 13576 - protein, 16 aa, Artificial Sequence
  Synthetically generated peptide
  VARIANT (1)..(16): Xaa = Any Amino Acid
CCEXXWACNPACXTGA

SEQ ID NO: 13577 - protein, 17 aa, Artificial Sequence
  Synthetically generated peptide
  VARIANT (1)..(17): Xaa = Any Amino Acid
CCEXXWACNPACXXTGA

SEQ ID NO: 13578 - protein, 17 aa, Artificial Sequence
  Synthetically generated peptide
  VARIANT (1)..(17): Xaa = Any Amino Acid
CCEXXWACNPACXTXGA

SEQ ID NO: 13579 - protein, 17 aa, Artificial Sequence
  Synthetically generated peptide
  VARIANT (1)..(17): Xaa = Any Amino Acid
CCEXXWACNPACXTGXA

SEQ ID NO: 13580 - protein, 16 aa, Artificial Sequence
  Synthetically generated peptide
  VARIANT (1)..(16): Xaa = Any Amino Acid
CCEXXWACNPACTXGA

SEQ ID NO: 13581 - protein, 17 aa, Artificial Sequence
  Synthetically generated peptide
  VARIANT (1)..(17): Xaa = Any Amino Acid
CCEXXWACNPACTXXGA

SEQ ID NO: 13582 - protein, 17 aa, Artificial Sequence
  Synthetically generated peptide
  VARIANT (1)..(17): Xaa = Any Amino Acid
CCEXXWACNPACTXGXA

SEQ ID NO: 13583 - protein, 16 aa, Artificial Sequence
  Synthetically generated peptide
  VARIANT (1)..(16): Xaa = Any Amino Acid
CCEXXWACNPACTGXA

SEQ ID NO: 13584 - protein, 17 aa, Artificial Sequence
  Synthetically generated peptide
  VARIANT (1)..(17): Xaa = Any Amino Acid
CCEXXWACNPACTGXXA

SEQ ID NO: 13585 - protein, 15 aa, Artificial Sequence
  Synthetically generated peptide
  VARIANT (1)..(15): Xaa = Any Amino Acid
CCEXWXACNPACTGA

SEQ ID NO: 13586 - protein, 16 aa, Artificial Sequence
  Synthetically generated peptide
  VARIANT (1)..(16): Xaa = Any Amino Acid
CCEXWXXACNPACTGA

SEQ ID NO: 13587 - protein, 17 aa, Artificial Sequence
  Synthetically generated peptide
  VARIANT (1)..(17): Xaa = Any Amino Acid
CCEXWXXXACNPACTGA

SEQ ID NO: 13588 - protein, 17 aa, Artificial Sequence
  Synthetically generated peptide
  VARIANT (1)..(17): Xaa = Any Amino Acid
CCEXWXXACXNPACTGA

SEQ ID NO: 13589 - protein, 17 aa, Artificial Sequence
  Synthetically generated peptide
  VARIANT (1)..(17): Xaa = Any Amino Acid
CCEXWXXACNXPACTGA

SEQ ID NO: 13590 - protein, 17 aa, Artificial Sequence
  Synthetically generated peptide
  VARIANT (1)..(17): Xaa = Any Amino Acid
CCEXWXXACNPXACTGA

SEQ ID NO: 13591 - protein, 17 aa, Artificial Sequence
  Synthetically generated peptide
  VARIANT (1)..(17): Xaa = Any Amino Acid
CCEXWXXACNPAXCTGA

SEQ ID NO: 13592 - protein, 17 aa, Artificial Sequence
  Synthetically generated peptide
  VARIANT (1)..(17): Xaa = Any Amino Acid
CCEXWXXACNPACXTGA

SEQ ID NO: 13593 - protein, 17 aa, Artificial Sequence
  Synthetically generated peptide
  VARIANT (1)..(17): Xaa = Any Amino Acid
CCEXWXXACNPACTXGA

SEQ ID NO: 13594 - protein, 17 aa, Artificial Sequence
  Synthetically generated peptide
  VARIANT (1)..(17): Xaa = Any Amino Acid
CCEXWXXACNPACTGXA

SEQ ID NO: 13595 - protein, 16 aa, Artificial Sequence
  Synthetically generated peptide
  VARIANT (1)..(16): Xaa = Any Amino Acid
CCEXWXACXNPACTGA

SEQ ID NO: 13596 - protein, 17 aa, Artificial Sequence
  Synthetically generated peptide
  VARIANT (1)..(17): Xaa = Any Amino Acid
CCEXWXACXXNPACTGA

SEQ ID NO: 13597 - protein, 17 aa, Artificial Sequence
  Synthetically generated peptide
  VARIANT (1)..(17): Xaa = Any Amino Acid
CCEXWXACXNXPACTGA

SEQ ID NO: 13598 - protein, 17 aa, Artificial Sequence
  Synthetically generated peptide
  VARIANT (1)..(17): Xaa = Any Amino Acid
CCEXWXACXNPXACTGA

SEQ ID NO: 13599 - protein, 17 aa, Artificial Sequence
  Synthetically generated peptide
  VARIANT (1)..(17): Xaa = Any Amino Acid
CCEXWXACXNPAXCTGA

SEQ ID NO: 13600 - protein, 17 aa, Artificial Sequence
  Synthetically generated peptide
  VARIANT (1)..(17): Xaa = Any Amino Acid
CCEXWXACXNPACXTGA

SEQ ID NO: 13601 - protein, 17 aa, Artificial Sequence
  Synthetically generated peptide
  VARIANT (1)..(17): Xaa = Any Amino Acid
CCEXWXACXNPACTXGA

SEQ ID NO: 13602 - protein, 17 aa, Artificial Sequence
  Synthetically generated peptide
  VARIANT (1)..(17): Xaa = Any Amino Acid
CCEXWXACXNPACTGXA

SEQ ID NO: 13603 - protein, 16 aa, Artificial Sequence
  Synthetically generated peptide
  VARIANT (1)..(16): Xaa = Any Amino Acid
CCEXWXACNXPACTGA

SEQ ID NO: 13604 - protein, 17 aa, Artificial Sequence
  Synthetically generated peptide
  VARIANT (1)..(17): Xaa = Any Amino Acid
CCEXWXACNXXPACTGA

SEQ ID NO: 13605 - protein, 17 aa, Artificial Sequence
  Synthetically generated peptide
  VARIANT (1)..(17): Xaa = Any Amino Acid
CCEXWXACNXPXACTGA

SEQ ID NO: 13606 - protein, 17 aa, Artificial Sequence
  Synthetically generated peptide
  VARIANT (1)..(17): Xaa = Any Amino Acid
CCEXWXACNXPAXCTGA

SEQ ID NO: 13607 - protein, 17 aa, Artificial Sequence
  Synthetically generated peptide
  VARIANT (1)..(17): Xaa = Any Amino Acid
CCEXWXACNXPACXTGA

SEQ ID NO: 13608 - protein, 17 aa, Artificial Sequence
  Synthetically generated peptide
  VARIANT (1)..(17): Xaa = Any Amino Acid
CCEXWXACNXPACTXGA

SEQ ID NO: 13609 - protein, 17 aa, Artificial Sequence
  Synthetically generated peptide
  VARIANT (1)..(17): Xaa = Any Amino Acid
CCEXWXACNXPACTGXA

SEQ ID NO: 13610 - protein, 16 aa, Artificial Sequence
  Synthetically generated peptide
  VARIANT (1)..(16): Xaa = Any Amino Acid
CCEXWXACNPXACTGA

SEQ ID NO: 13611 - protein, 17 aa, Artificial Sequence
  Synthetically generated peptide
  VARIANT (1)..(17): Xaa = Any Amino Acid
CCEXWXACNPXXACTGA

SEQ ID NO: 13612 - protein, 17 aa, Artificial Sequence
  Synthetically generated peptide
  VARIANT (1)..(17): Xaa = Any Amino Acid
CCEXWXACNPXAXCTGA

SEQ ID NO: 13613 - protein, 17 aa, Artificial Sequence
  Synthetically generated peptide
  VARIANT (1)..(17): Xaa = Any Amino Acid
CCEXWXACNPXACXTGA

SEQ ID NO: 13614 - protein, 17 aa, Artificial Sequence
  Synthetically generated peptide
  VARIANT (1)..(17): Xaa = Any Amino Acid
CCEXWXACNPXACTXGA

SEQ ID NO: 13615 - protein, 17 aa, Artificial Sequence
  Synthetically generated peptide
  VARIANT (1)..(17): Xaa = Any Amino Acid
CCEXWXACNPXACTGXA

SEQ ID NO: 13616 - protein, 16 aa, Artificial Sequence
  Synthetically generated peptide
  VARIANT (1)..(16): Xaa = Any Amino Acid
CCEXWXACNPAXCTGA

SEQ ID NO: 13617 - protein, 17 aa, Artificial Sequence
  Synthetically generated peptide
  VARIANT (1)..(17): Xaa = Any Amino Acid
CCEXWXACNPAXXCTGA

SEQ ID NO: 13618 - protein, 17 aa, Artificial Sequence
  Synthetically generated peptide
  VARIANT (1)..(17): Xaa = Any Amino Acid
CCEXWXACNPAXCXTGA

SEQ ID NO: 13619 - protein, 17 aa, Artificial Sequence
  Synthetically generated peptide
  VARIANT (1)..(17): Xaa = Any Amino Acid
CCEXWXACNPAXCTXGA

SEQ ID NO: 13620 - protein, 17 aa, Artificial Sequence
  Synthetically generated peptide
  VARIANT (1)..(17): Xaa = Any Amino Acid
CCEXWXACNPAXCTGXA

SEQ ID NO: 13621 - protein, 16 aa, Artificial Sequence
  Synthetically generated peptide
  VARIANT (1)..(16): Xaa = Any Amino Acid
CCEXWXACNPACXTGA

SEQ ID NO: 13622 - protein, 17 aa, Artificial Sequence
  Synthetically generated peptide
  VARIANT (1)..(17): Xaa = Any Amino Acid
CCEXWXACNPACXXTGA

SEQ ID NO: 13623 - protein, 17 aa, Artificial Sequence
  Synthetically generated peptide
  VARIANT (1)..(17): Xaa = Any Amino Acid
CCEXWXACNPACXTXGA

SEQ ID NO: 13624 - protein, 17 aa, Artificial Sequence
  Synthetically generated peptide
  VARIANT (1)..(17): Xaa = Any Amino Acid
CCEXWXACNPACXTGXA

SEQ ID NO: 13625 - protein, 16 aa, Artificial Sequence
  Synthetically generated peptide
  VARIANT (1)..(16): Xaa = Any Amino Acid
CCEXWXACNPACTXGA

SEQ ID NO: 13626 - protein, 17 aa, Artificial Sequence
  Synthetically generated peptide
  VARIANT (1)..(17): Xaa = Any Amino Acid
CCEXWXACNPACTXXGA

SEQ ID NO: 13627 - protein, 17 aa, Artificial Sequence
  Synthetically generated peptide
  VARIANT (1)..(17): Xaa = Any Amino Acid
CCEXWXACNPACTXGXA

SEQ ID NO: 13628 - protein, 16 aa, Artificial Sequence
  Synthetically generated peptide
  VARIANT (1)..(16): Xaa = Any Amino Acid
CCEXWXACNPACTGXA

SEQ ID NO: 13629 - protein, 17 aa, Artificial Sequence
  Synthetically generated peptide
  VARIANT (1)..(17): Xaa = Any Amino Acid
CCEXWXACNPACTGXXA

SEQ ID NO: 13630 - protein, 15 aa, Artificial Sequence
  Synthetically generated peptide
  VARIANT (1)..(15): Xaa = Any Amino Acid
CCEXWACXNPACTGA

SEQ ID NO: 13631 - protein, 16 aa, Artificial Sequence
  Synthetically generated peptide
  VARIANT (1)..(16): Xaa = Any Amino Acid
CCEXWACXXNPACTGA

SEQ ID NO: 13632 - protein, 17 aa, Artificial Sequence
  Synthetically generated peptide
  VARIANT (1)..(17): Xaa = Any Amino Acid
CCEXWACXXXNPACTGA

SEQ ID NO: 13633 - protein, 17 aa, Artificial Sequence
  Synthetically generated peptide
  VARIANT (1)..(17): Xaa = Any Amino Acid
CCEXWACXXNXPACTGA

SEQ ID NO: 13634 - protein, 17 aa, Artificial Sequence
  Synthetically generated peptide
  VARIANT (1)..(17): Xaa = Any Amino Acid
CCEXWACXXNPXACTGA

SEQ ID NO: 13635 - protein, 17 aa, Artificial Sequence
  Synthetically generated peptide
  VARIANT (1)..(17): Xaa = Any Amino Acid
CCEXWACXXNPAXCTGA

SEQ ID NO: 13636 - protein, 17 aa, Artificial Sequence
  Synthetically generated peptide
  VARIANT (1)..(17): Xaa = Any Amino Acid
CCEXWACXXNPACXTGA

SEQ ID NO: 13637 - protein, 17 aa, Artificial Sequence
  Synthetically generated peptide
  VARIANT (1)..(17): Xaa = Any Amino Acid
CCEXWACXXNPACTXGA

SEQ ID NO: 13638 - protein, 17 aa, Artificial Sequence
  Synthetically generated peptide
  VARIANT (1)..(17): Xaa = Any Amino Acid
CCEXWACXXNPACTGXA

SEQ ID NO: 13639 - protein, 16 aa, Artificial Sequence
  Synthetically generated peptide
  VARIANT (1)..(16): Xaa = Any Amino Acid
CCEXWACXNXPACTGA

SEQ ID NO: 13640 - protein, 17 aa, Artificial Sequence
  Synthetically generated peptide
  VARIANT (1)..(17): Xaa = Any Amino Acid
CCEXWACXNXXPACTGA

SEQ ID NO: 13641 - protein, 17 aa, Artificial Sequence
  Synthetically generated peptide
  VARIANT (1)..(17): Xaa = Any Amino Acid
CCEXWACXNXPXACTGA

SEQ ID NO: 13642 - protein, 17 aa, Artificial Sequence
  Synthetically generated peptide
  VARIANT (1)..(17): Xaa = Any Amino Acid
CCEXWACXNXPAXCTGA

SEQ ID NO: 13643 - protein, 17 aa, Artificial Sequence
  Synthetically generated peptide
  VARIANT (1)..(17): Xaa = Any Amino Acid
CCEXWACXNXPACXTGA

SEQ ID NO: 13644 - protein, 17 aa, Artificial Sequence
  Synthetically generated peptide
  VARIANT (1)..(17): Xaa = Any Amino Acid
CCEXWACXNXPACTXGA

SEQ ID NO: 13645 - protein, 17 aa, Artificial Sequence
  Synthetically generated peptide
  VARIANT (1)..(17): Xaa = Any Amino Acid
CCEXWACXNXPACTGXA

SEQ ID NO: 13646 - protein, 16 aa, Artificial Sequence
  Synthetically generated peptide
  VARIANT (1)..(16): Xaa = Any Amino Acid
CCEXWACXNPXACTGA

SEQ ID NO: 13647 - protein, 17 aa, Artificial Sequence
  Synthetically generated peptide
  VARIANT (1)..(17): Xaa = Any Amino Acid
CCEXWACXNPXXACTGA

SEQ ID NO: 13648 - protein, 17 aa, Artificial Sequence
  Synthetically generated peptide
  VARIANT (1)..(17): Xaa = Any Amino Acid
CCEXWACXNPXAXCTGA

SEQ ID NO: 13649 - protein, 17 aa, Artificial Sequence
  Synthetically generated peptide
  VARIANT (1)..(17): Xaa = Any Amino Acid
CCEXWACXNPXACXTGA

SEQ ID NO: 13650 - protein, 17 aa, Artificial Sequence
  Synthetically generated peptide
  VARIANT (1)..(17): Xaa = Any Amino Acid
CCEXWACXNPXACTXGA

SEQ ID NO: 13651 - protein, 17 aa, Artificial Sequence
  Synthetically generated peptide
  VARIANT (1)..(17): Xaa = Any Amino Acid
CCEXWACXNPXACTGXA

SEQ ID NO: 13652 - protein, 16 aa, Artificial Sequence
  Synthetically generated peptide
  VARIANT (1)..(16): Xaa = Any Amino Acid
CCEXWACXNPAXCTGA

SEQ ID NO: 13653 - protein, 17 aa, Artificial Sequence
  Synthetically generated peptide
  VARIANT (1)..(17): Xaa = Any Amino Acid
CCEXWACXNPAXXCTGA

SEQ ID NO: 13654 - protein, 17 aa, Artificial Sequence
  Synthetically generated peptide
  VARIANT (1)..(17): Xaa = Any Amino Acid
CCEXWACXNPAXCXTGA

SEQ ID NO: 13655 - protein, 17 aa, Artificial Sequence
  Synthetically generated peptide
  VARIANT (1)..(17): Xaa = Any Amino Acid
CCEXWACXNPAXCTXGA

SEQ ID NO: 13656 - protein, 17 aa, Artificial Sequence
  Synthetically generated peptide
  VARIANT (1)..(17): Xaa = Any Amino Acid
CCEXWACXNPAXCTGXA

SEQ ID NO: 13657 - protein, 16 aa, Artificial Sequence
  Synthetically generated peptide
  VARIANT (1)..(16): Xaa = Any Amino Acid
CCEXWACXNPACXTGA

SEQ ID NO: 13658 - protein, 17 aa, Artificial Sequence
  Synthetically generated peptide
  VARIANT (1)..(17): Xaa = Any Amino Acid
CCEXWACXNPACXXTGA

SEQ ID NO: 13659 - protein, 17 aa, Artificial Sequence
  Synthetically generated peptide
  VARIANT (1)..(17): Xaa = Any Amino Acid
CCEXWACXNPACXTXGA

SEQ ID NO: 13660 - protein, 17 aa, Artificial Sequence
  Synthetically generated peptide
  VARIANT (1)..(17): Xaa = Any Amino Acid
CCEXWACXNPACXTGXA

SEQ ID NO: 13661 - protein, 16 aa, Artificial Sequence
  Synthetically generated peptide
  VARIANT (1)..(16): Xaa = Any Amino Acid
CCEXWACXNPACTXGA

SEQ ID NO: 13662 - protein, 17 aa, Artificial Sequence
  Synthetically generated peptide
  VARIANT (1)..(17): Xaa = Any Amino Acid
CCEXWACXNPACTXXGA

SEQ ID NO: 13663 - protein, 17 aa, Artificial Sequence
  Synthetically generated peptide
  VARIANT (1)..(17): Xaa = Any Amino Acid
CCEXWACXNPACTXGXA

SEQ ID NO: 13664 - protein, 16 aa, Artificial Sequence
  Synthetically generated peptide
  VARIANT (1)..(16): Xaa = Any Amino Acid
CCEXWACXNPACTGXA

SEQ ID NO: 13665 - protein, 17 aa, Artificial Sequence
  Synthetically generated peptide
  VARIANT (1)..(17): Xaa = Any Amino Acid
CCEXWACXNPACTGXXA

SEQ ID NO: 13666 - protein, 15 aa, Artificial Sequence
  Synthetically generated peptide
  VARIANT (1)..(15): Xaa = Any Amino Acid
CCEXWACNXPACTGA

SEQ ID NO: 13667 - protein, 16 aa, Artificial Sequence
  Synthetically generated peptide
  VARIANT (1)..(16): Xaa = Any Amino Acid
CCEXWACNXXPACTGA

SEQ ID NO: 13668 - protein, 17 aa, Artificial Sequence
  Synthetically generated peptide
  VARIANT (1)..(17): Xaa = Any Amino Acid
CCEXWACNXXXPACTGA

SEQ ID NO: 13669 - protein, 17 aa, Artificial Sequence
  Synthetically generated peptide
  VARIANT (1)..(17): Xaa = Any Amino Acid
CCEXWACNXXPXACTGA

SEQ ID NO: 13670 - protein, 17 aa, Artificial Sequence
  Synthetically generated peptide
  VARIANT (1)..(17): Xaa = Any Amino Acid
CCEXWACNXXPAXCTGA

SEQ ID NO: 13671 - protein, 17 aa, Artificial Sequence
  Synthetically generated peptide
  VARIANT (1)..(17): Xaa = Any Amino Acid
CCEXWACNXXPACXTGA

SEQ ID NO: 13672 - protein, 17 aa, Artificial Sequence
  Synthetically generated peptide
  VARIANT (1)..(17): Xaa = Any Amino Acid
CCEXWACNXXPACTXGA

SEQ ID NO: 13673 - protein, 17 aa, Artificial Sequence
  Synthetically generated peptide
  VARIANT (1)..(17): Xaa = Any Amino Acid
CCEXWACNXXPACTGXA

SEQ ID NO: 13674 - protein, 16 aa, Artificial Sequence
  Synthetically generated peptide
  VARIANT (1)..(16): Xaa = Any Amino Acid
CCEXWACNXPXACTGA

SEQ ID NO: 13675 - protein, 17 aa, Artificial Sequence
  Synthetically generated peptide
  VARIANT (1)..(17): Xaa = Any Amino Acid
CCEXWACNXPXXACTGA

SEQ ID NO: 13676 - protein, 17 aa, Artificial Sequence
  Synthetically generated peptide
  VARIANT (1)..(17): Xaa = Any Amino Acid
CCEXWACNXPXAXCTGA

SEQ ID NO: 13677 - protein, 17 aa, Artificial Sequence
  Synthetically generated peptide
  VARIANT (1)..(17): Xaa = Any Amino Acid
CCEXWACNXPXACXTGA

SEQ ID NO: 13678 - protein, 17 aa, Artificial Sequence
  Synthetically generated peptide
  VARIANT (1)..(17): Xaa = Any Amino Acid
CCEXWACNXPXACTXGA

SEQ ID NO: 13679 - protein, 17 aa, Artificial Sequence
  Synthetically generated peptide
  VARIANT (1)..(17): Xaa = Any Amino Acid
CCEXWACNXPXACTGXA

SEQ ID NO: 13680 - protein, 16 aa, Artificial Sequence
  Synthetically generated peptide
  VARIANT (1)..(16): Xaa = Any Amino Acid
CCEXWACNXPAXCTGA

SEQ ID NO: 13681 - protein, 17 aa, Artificial Sequence
  Synthetically generated peptide
  VARIANT (1)..(17): Xaa = Any Amino Acid
CCEXWACNXPAXXCTGA

SEQ ID NO: 13682 - protein, 17 aa, Artificial Sequence
  Synthetically generated peptide
  VARIANT (1)..(17): Xaa = Any Amino Acid
CCEXWACNXPAXCXTGA

SEQ ID NO: 13683 - protein, 17 aa, Artificial Sequence
  Synthetically generated peptide
  VARIANT (1)..(17): Xaa = Any Amino Acid
CCEXWACNXPAXCTXGA

SEQ ID NO: 13684 - protein, 17 aa, Artificial Sequence
  Synthetically generated peptide
  VARIANT (1)..(17): Xaa = Any Amino Acid
CCEXWACNXPAXCTGXA

SEQ ID NO: 13685 - protein, 16 aa, Artificial Sequence
  Synthetically generated peptide
  VARIANT (1)..(16): Xaa = Any Amino Acid
CCEXWACNXPACXTGA

SEQ ID NO: 13686 - protein, 17 aa, Artificial Sequence
  Synthetically generated peptide
  VARIANT (1)..(17): Xaa = Any Amino Acid
CCEXWACNXPACXXTGA

SEQ ID NO: 13687 - protein, 17 aa, Artificial Sequence
  Synthetically generated peptide
  VARIANT (1)..(17): Xaa = Any Amino Acid
CCEXWACNXPACXTXGA

SEQ ID NO: 13688 - protein, 17 aa, Artificial Sequence
  Synthetically generated peptide
  VARIANT (1)..(17): Xaa = Any Amino Acid
CCEXWACNXPACXTGXA

SEQ ID NO: 13689 - protein, 16 aa, Artificial Sequence
  Synthetically generated peptide
  VARIANT (1)..(16): Xaa = Any Amino Acid
CCEXWACNXPACTXGA

SEQ ID NO: 13690 - protein, 17 aa, Artificial Sequence
  Synthetically generated peptide
  VARIANT (1)..(17): Xaa = Any Amino Acid
CCEXWACNXPACTXXGA

SEQ ID NO: 13691 - protein, 17 aa, Artificial Sequence
  Synthetically generated peptide
  VARIANT (1)..(17): Xaa = Any Amino Acid
CCEXWACNXPACTXGXA

SEQ ID NO: 13692 - protein, 16 aa, Artificial Sequence
  Synthetically generated peptide
  VARIANT (1)..(16): Xaa = Any Amino Acid
CCEXWACNXPACTGXA

SEQ ID NO: 13693 - protein, 17 aa, Artificial Sequence
  Synthetically generated peptide
  VARIANT (1)..(17): Xaa = Any Amino Acid
CCEXWACNXPACTGXXA

SEQ ID NO: 13694 - protein, 15 aa, Artificial Sequence
  Synthetically generated peptide
  VARIANT (1)..(15): Xaa = Any Amino Acid
CCEXWACNPXACTGA

SEQ ID NO: 13695 - protein, 16 aa, Artificial Sequence
  Synthetically generated peptide
  VARIANT (1)..(16): Xaa = Any Amino Acid
CCEXWACNPXXACTGA

SEQ ID NO: 13696 - protein, 17 aa, Artificial Sequence
  Synthetically generated peptide
  VARIANT (1)..(17): Xaa = Any Amino Acid
CCEXWACNPXXXACTGA

SEQ ID NO: 13697 - protein, 17 aa, Artificial Sequence
  Synthetically generated peptide
  VARIANT (1)..(17): Xaa = Any Amino Acid
CCEXWACNPXXAXCTGA

SEQ ID NO: 13698 - protein, 17 aa, Artificial Sequence
  Synthetically generated peptide
  VARIANT (1)..(17): Xaa = Any Amino Acid
CCEXWACNPXXACXTGA

SEQ ID NO: 13699 - protein, 17 aa, Artificial Sequence
  Synthetically generated peptide
  VARIANT (1)..(17): Xaa = Any Amino Acid
CCEXWACNPXXACTXGA

SEQ ID NO: 13700 - protein, 17 aa, Artificial Sequence
  Synthetically generated peptide
  VARIANT (1)..(17): Xaa = Any Amino Acid
CCEXWACNPXXACTGXA

SEQ ID NO: 13701 - protein, 16 aa, Artificial Sequence
  Synthetically generated peptide
  VARIANT (1)..(16): Xaa = Any Amino Acid
CCEXWACNPXAXCTGA

SEQ ID NO: 13702 - protein, 17 aa, Artificial Sequence
  Synthetically generated peptide
  VARIANT (1)..(17): Xaa = Any Amino Acid
CCEXWACNPXAXXCTGA

SEQ ID NO: 13703 - protein, 17 aa, Artificial Sequence
  Synthetically generated peptide
  VARIANT (1)..(17): Xaa = Any Amino Acid
CCEXWACNPXAXCXTGA

SEQ ID NO: 13704 - protein, 17 aa, Artificial Sequence
  Synthetically generated peptide
  VARIANT (1)..(17): Xaa = Any Amino Acid
CCEXWACNPXAXCTXGA

SEQ ID NO: 13705 - protein, 17 aa, Artificial Sequence
  Synthetically generated peptide
  VARIANT (1)..(17): Xaa = Any Amino Acid
CCEXWACNPXAXCTGXA

SEQ ID NO: 13706 - protein, 16 aa, Artificial Sequence
  Synthetically generated peptide
  VARIANT (1)..(16): Xaa = Any Amino Acid
CCEXWACNPXACXTGA

SEQ ID NO: 13707 - protein, 17 aa, Artificial Sequence
  Synthetically generated peptide
  VARIANT (1)..(17): Xaa = Any Amino Acid
CCEXWACNPXACXXTGA

SEQ ID NO: 13708 - protein, 17 aa, Artificial Sequence
  Synthetically generated peptide
  VARIANT (1)..(17): Xaa = Any Amino Acid
CCEXWACNPXACXTXGA

SEQ ID NO: 13709 - protein, 17 aa, Artificial Sequence
  Synthetically generated peptide
  VARIANT (1)..(17): Xaa = Any Amino Acid
CCEXWACNPXACXTGXA

SEQ ID NO: 13710 - protein, 16 aa, Artificial Sequence
  Synthetically generated peptide
  VARIANT (1)..(16): Xaa = Any Amino Acid
CCEXWACNPXACTXGA

SEQ ID NO: 13711 - protein, 17 aa, Artificial Sequence
  Synthetically generated peptide
  VARIANT (1)..(17): Xaa = Any Amino Acid
CCEXWACNPXACTXXGA

SEQ ID NO: 13712 - protein, 17 aa, Artificial Sequence
  Synthetically generated peptide
  VARIANT (1)..(17): Xaa = Any Amino Acid
CCEXWACNPXACTXGXA

SEQ ID NO: 13713 - protein, 16 aa, Artificial Sequence
  Synthetically generated peptide
  VARIANT (1)..(16): Xaa = Any Amino Acid
CCEXWACNPXACTGXA

SEQ ID NO: 13714 - protein, 17 aa, Artificial Sequence
  Synthetically generated peptide
  VARIANT (1)..(17): Xaa = Any Amino Acid
CCEXWACNPXACTGXXA

SEQ ID NO: 13715 - protein, 15 aa, Artificial Sequence
  Synthetically generated peptide
  VARIANT (1)..(15): Xaa = Any Amino Acid
CCEXWACNPAXCTGA

SEQ ID NO: 13716 - protein, 16 aa, Artificial Sequence
  Synthetically generated peptide
  VARIANT (1)..(16): Xaa = Any Amino Acid
CCEXWACNPAXXCTGA

SEQ ID NO: 13717 - protein, 17 aa, Artificial Sequence
  Synthetically generated peptide
  VARIANT (1)..(17): Xaa = Any Amino Acid
CCEXWACNPAXXXCTGA

SEQ ID NO: 13718 - protein, 17 aa, Artificial Sequence
  Synthetically generated peptide
  VARIANT (1)..(17): Xaa = Any Amino Acid
CCEXWACNPAXXCXTGA

SEQ ID NO: 13719 - protein, 17 aa, Artificial Sequence
  Synthetically generated peptide
  VARIANT (1)..(17): Xaa = Any Amino Acid
CCEXWACNPAXXCTXGA

SEQ ID NO: 13720 - protein, 17 aa, Artificial Sequence
  Synthetically generated peptide
  VARIANT (1)..(17): Xaa = Any Amino Acid
CCEXWACNPAXXCTGXA

SEQ ID NO: 13721 - protein, 16 aa, Artificial Sequence
  Synthetically generated peptide
  VARIANT (1)..(16): Xaa = Any Amino Acid
CCEXWACNPAXCXTGA

SEQ ID NO: 13722 - protein, 17 aa, Artificial Sequence
  Synthetically generated peptide
  VARIANT (1)..(17): Xaa = Any Amino Acid
CCEXWACNPAXCXXTGA

SEQ ID NO: 13723 - protein, 17 aa, Artificial Sequence
  Synthetically generated peptide
  VARIANT (1)..(17): Xaa = Any Amino Acid
CCEXWACNPAXCXTXGA

SEQ ID NO: 13724 - protein, 17 aa, Artificial Sequence
  Synthetically generated peptide
  VARIANT (1)..(17): Xaa = Any Amino Acid
CCEXWACNPAXCXTGXA

SEQ ID NO: 13725 - protein, 16 aa, Artificial Sequence
  Synthetically generated peptide
  VARIANT (1)..(16): Xaa = Any Amino Acid
CCEXWACNPAXCTXGA

SEQ ID NO: 13726 - protein, 17 aa, Artificial Sequence
  Synthetically generated peptide
  VARIANT (1)..(17): Xaa = Any Amino Acid
CCEXWACNPAXCTXXGA

SEQ ID NO: 13727 - protein, 17 aa, Artificial Sequence
  Synthetically generated peptide
  VARIANT (1)..(17): Xaa = Any Amino Acid
CCEXWACNPAXCTXGXA

SEQ ID NO: 13728 - protein, 16 aa, Artificial Sequence
  Synthetically generated peptide
  VARIANT (1)..(16): Xaa = Any Amino Acid
CCEXWACNPAXCTGXA

SEQ ID NO: 13729 - protein, 17 aa, Artificial Sequence
  Synthetically generated peptide
  VARIANT (1)..(17): Xaa = Any Amino Acid
CCEXWACNPAXCTGXXA

SEQ ID NO: 13730 - protein, 15 aa, Artificial Sequence
  Synthetically generated peptide
  VARIANT (1)..(15): Xaa = Any Amino Acid
CCEXWACNPACXTGA

SEQ ID NO: 13731 - protein, 16 aa, Artificial Sequence
  Synthetically generated peptide
  VARIANT (1)..(16): Xaa = Any Amino Acid
CCEXWACNPACXXTGA

SEQ ID NO: 13732 - protein, 17 aa, Artificial Sequence
  Synthetically generated peptide
  VARIANT (1)..(17): Xaa = Any Amino Acid
CCEXWACNPACXXXTGA

SEQ ID NO: 13733 - protein, 17 aa, Artificial Sequence
  Synthetically generated peptide
  VARIANT (1)..(17): Xaa = Any Amino Acid
CCEXWACNPACXXTXGA

SEQ ID NO: 13734 - protein, 17 aa, Artificial Sequence
  Synthetically generated peptide
  VARIANT (1)..(17): Xaa = Any Amino Acid
CCEXWACNPACXXTGXA

SEQ ID NO: 13735 - protein, 16 aa, Artificial Sequence
  Synthetically generated peptide
  VARIANT (1)..(16): Xaa = Any Amino Acid
CCEXWACNPACXTXGA

SEQ ID NO: 13736 - protein, 17 aa, Artificial Sequence
  Synthetically generated peptide
  VARIANT (1)..(17): Xaa = Any Amino Acid
CCEXWACNPACXTXXGA

SEQ ID NO: 13737 - protein, 17 aa, Artificial Sequence
  Synthetically generated peptide
  VARIANT (1)..(17): Xaa = Any Amino Acid
CCEXWACNPACXTXGXA

SEQ ID NO: 13738 - protein, 16 aa, Artificial Sequence
  Synthetically generated peptide
  VARIANT (1)..(16): Xaa = Any Amino Acid
CCEXWACNPACXTGXA

SEQ ID NO: 13739 - protein, 17 aa, Artificial Sequence
  Synthetically generated peptide
  VARIANT (1)..(17): Xaa = Any Amino Acid
CCEXWACNPACXTGXXA

SEQ ID NO: 13740 - protein, 15 aa, Artificial Sequence
  Synthetically generated peptide
  VARIANT (1)..(15): Xaa = Any Amino Acid
CCEXWACNPACTXGA

SEQ ID NO: 13741 - protein, 16 aa, Artificial Sequence
  Synthetically generated peptide
  VARIANT (1)..(16): Xaa = Any Amino Acid
CCEXWACNPACTXXGA

SEQ ID NO: 13742 - protein, 17 aa, Artificial Sequence
  Synthetically generated peptide
  VARIANT (1)..(17): Xaa = Any Amino Acid
CCEXWACNPACTXXXGA

SEQ ID NO: 13743 - protein, 17 aa, Artificial Sequence
  Synthetically generated peptide
  VARIANT (1)..(17): Xaa = Any Amino Acid
CCEXWACNPACTXXGXA

SEQ ID NO: 13744 - protein, 16 aa, Artificial Sequence
  Synthetically generated peptide
  VARIANT (1)..(16): Xaa = Any Amino Acid
CCEXWACNPACTXGXA

SEQ ID NO: 13745 - protein, 17 aa, Artificial Sequence
  Synthetically generated peptide
  VARIANT (1)..(17): Xaa = Any Amino Acid
CCEXWACNPACTXGXXA

SEQ ID NO: 13746 - protein, 15 aa, Artificial Sequence
  Synthetically generated peptide
  VARIANT (1)..(15): Xaa = Any Amino Acid
CCEXWACNPACTGXA

SEQ ID NO: 13747 - protein, 16 aa, Artificial Sequence
  Synthetically generated peptide
  VARIANT (1)..(16): Xaa = Any Amino Acid
CCEXWACNPACTGXXA

SEQ ID NO: 13748 - protein, 17 aa, Artificial Sequence
  Synthetically generated peptide
  VARIANT (1)..(17): Xaa = Any Amino Acid
CCEXWACNPACTGXXXA

SEQ ID NO: 13749 - protein, 14 aa, Artificial Sequence
  Synthetically generated peptide
  VARIANT (1)..(14): Xaa = Any Amino Acid
CCEWXACNPACTGA

SEQ ID NO: 13750 - protein, 15 aa, Artificial Sequence
  Synthetically generated peptide
  VARIANT (1)..(15): Xaa = Any Amino Acid
CCEWXXACNPACTGA

SEQ ID NO: 13751 - protein, 16 aa, Artificial Sequence
  Synthetically generated peptide
  VARIANT (1)..(16): Xaa = Any Amino Acid
CCEWXXXACNPACTGA

SEQ ID NO: 13752 - protein, 17 aa, Artificial Sequence
  Synthetically generated peptide
  VARIANT (1)..(17): Xaa = Any Amino Acid
CCEWXXXXACNPACTGA

SEQ ID NO: 13753 - protein, 17 aa, Artificial Sequence
  Synthetically generated peptide
  VARIANT (1)..(17): Xaa = Any Amino Acid
CCEWXXXACXNPACTGA

SEQ ID NO: 13754 - protein, 17 aa, Artificial Sequence
  Synthetically generated peptide
  VARIANT (1)..(17): Xaa = Any Amino Acid
CCEWXXXACNXPACTGA

SEQ ID NO: 13755 - protein, 17 aa, Artificial Sequence
  Synthetically generated peptide
  VARIANT (1)..(17): Xaa = Any Amino Acid
CCEWXXXACNPXACTGA

SEQ ID NO: 13756 - protein, 17 aa, Artificial Sequence
  Synthetically generated peptide
  VARIANT (1)..(17): Xaa = Any Amino Acid
CCEWXXXACNPAXCTGA

SEQ ID NO: 13757 - protein, 17 aa, Artificial Sequence
  Synthetically generated peptide
  VARIANT (1)..(17): Xaa = Any Amino Acid
CCEWXXXACNPACXTGA

SEQ ID NO: 13758 - protein, 17 aa, Artificial Sequence
  Synthetically generated peptide
  VARIANT (1)..(17): Xaa = Any Amino Acid
CCEWXXXACNPACTXGA

SEQ ID NO: 13759 - protein, 17 aa, Artificial Sequence
  Synthetically generated peptide
  VARIANT (1)..(17): Xaa = Any Amino Acid
CCEWXXXACNPACTGXA

SEQ ID NO: 13760 - protein, 16 aa, Artificial Sequence
  Synthetically generated peptide
  VARIANT (1)..(16): Xaa = Any Amino Acid
CCEWXXACXNPACTGA

SEQ ID NO: 13761 - protein, 17 aa, Artificial Sequence
  Synthetically generated peptide
  VARIANT (1)..(17): Xaa = Any Amino Acid
CCEWXXACXXNPACTGA

SEQ ID NO: 13762 - protein, 17 aa, Artificial Sequence
  Synthetically generated peptide
  VARIANT (1)..(17): Xaa = Any Amino Acid
CCEWXXACXNXPACTGA

SEQ ID NO: 13763 - protein, 17 aa, Artificial Sequence
  Synthetically generated peptide
  VARIANT (1)..(17): Xaa = Any Amino Acid
CCEWXXACXNPXACTGA

SEQ ID NO: 13764 - protein, 17 aa, Artificial Sequence
  Synthetically generated peptide
  VARIANT (1)..(17): Xaa = Any Amino Acid
CCEWXXACXNPAXCTGA

SEQ ID NO: 13765 - protein, 17 aa, Artificial Sequence
  Synthetically generated peptide
  VARIANT (1)..(17): Xaa = Any Amino Acid
CCEWXXACXNPACXTGA

SEQ ID NO: 13766 - protein, 17 aa, Artificial Sequence
  Synthetically generated peptide
  VARIANT (1)..(17): Xaa = Any Amino Acid
CCEWXXACXNPACTXGA

SEQ ID NO: 13767 - protein, 17 aa, Artificial Sequence
  Synthetically generated peptide
  VARIANT (1)..(17): Xaa = Any Amino Acid
CCEWXXACXNPACTGXA

SEQ ID NO: 13768 - protein, 16 aa, Artificial Sequence
  Synthetically generated peptide
  VARIANT (1)..(16): Xaa = Any Amino Acid
CCEWXXACNXPACTGA

SEQ ID NO: 13769 - protein, 17 aa, Artificial Sequence
  Synthetically generated peptide
  VARIANT (1)..(17): Xaa = Any Amino Acid
CCEWXXACNXXPACTGA

SEQ ID NO: 13770 - protein, 17 aa, Artificial Sequence
  Synthetically generated peptide
  VARIANT (1)..(17): Xaa = Any Amino Acid
CCEWXXACNXPXACTGA

SEQ ID NO: 13771 - protein, 17 aa, Artificial Sequence
  Synthetically generated peptide
  VARIANT (1)..(17): Xaa = Any Amino Acid
CCEWXXACNXPAXCTGA

SEQ ID NO: 13772 - protein, 17 aa, Artificial Sequence
  Synthetically generated peptide
  VARIANT (1)..(17): Xaa = Any Amino Acid
CCEWXXACNXPACXTGA

SEQ ID NO: 13773 - protein, 17 aa, Artificial Sequence
  Synthetically generated peptide
  VARIANT (1)..(17): Xaa = Any Amino Acid
CCEWXXACNXPACTXGA

SEQ ID NO: 13774 - protein, 17 aa, Artificial Sequence
  Synthetically generated peptide
  VARIANT (1)..(17): Xaa = Any Amino Acid
CCEWXXACNXPACTGXA

SEQ ID NO: 13775 - protein, 16 aa, Artificial Sequence
  Synthetically generated peptide
  VARIANT (1)..(16): Xaa = Any Amino Acid
CCEWXXACNPXACTGA

SEQ ID NO: 13776 - protein, 17 aa, Artificial Sequence
  Synthetically generated peptide
  VARIANT (1)..(17): Xaa = Any Amino Acid
CCEWXXACNPXXACTGA

SEQ ID NO: 13777 - protein, 17 aa, Artificial Sequence
  Synthetically generated peptide
  VARIANT (1)..(17): Xaa = Any Amino Acid
CCEWXXACNPXAXCTGA

SEQ ID NO: 13778 - protein, 17 aa, Artificial Sequence
  Synthetically generated peptide
  VARIANT (1)..(17): Xaa = Any Amino Acid
CCEWXXACNPXACXTGA

SEQ ID NO: 13779 - protein, 17 aa, Artificial Sequence
  Synthetically generated peptide
  VARIANT (1)..(17): Xaa = Any Amino Acid
CCEWXXACNPXACTXGA

SEQ ID NO: 13780 - protein, 17 aa, Artificial Sequence
  Synthetically generated peptide
  VARIANT (1)..(17): Xaa = Any Amino Acid
CCEWXXACNPXACTGXA

SEQ ID NO: 13781 - protein, 16 aa, Artificial Sequence
  Synthetically generated peptide
  VARIANT (1)..(16): Xaa = Any Amino Acid
CCEWXXACNPAXCTGA

SEQ ID NO: 13782 - protein, 17 aa, Artificial Sequence
  Synthetically generated peptide
  VARIANT (1)..(17): Xaa = Any Amino Acid
CCEWXXACNPAXXCTGA

SEQ ID NO: 13783 - protein, 17 aa, Artificial Sequence
  Synthetically generated peptide
  VARIANT (1)..(17): Xaa = Any Amino Acid
CCEWXXACNPAXCXTGA

SEQ ID NO: 13784 - protein, 17 aa, Artificial Sequence
  Synthetically generated peptide
  VARIANT (1)..(17): Xaa = Any Amino Acid
CCEWXXACNPAXCTXGA

SEQ ID NO: 13785 - protein, 17 aa, Artificial Sequence
  Synthetically generated peptide
  VARIANT (1)..(17): Xaa = Any Amino Acid
CCEWXXACNPAXCTGXA

SEQ ID NO: 13786 - protein, 16 aa, Artificial Sequence
  Synthetically generated peptide
  VARIANT (1)..(16): Xaa = Any Amino Acid
CCEWXXACNPACXTGA

SEQ ID NO: 13787 - protein, 17 aa, Artificial Sequence
  Synthetically generated peptide
  VARIANT (1)..(17): Xaa = Any Amino Acid
CCEWXXACNPACXXTGA

SEQ ID NO: 13788 - protein, 17 aa, Artificial Sequence
  Synthetically generated peptide
  VARIANT (1)..(17): Xaa = Any Amino Acid
CCEWXXACNPACXTXGA

SEQ ID NO: 13789 - protein, 17 aa, Artificial Sequence
  Synthetically generated peptide
  VARIANT (1)..(17): Xaa = Any Amino Acid
CCEWXXACNPACXTGXA

SEQ ID NO: 13790 - protein, 16 aa, Artificial Sequence
  Synthetically generated peptide
  VARIANT (1)..(16): Xaa = Any Amino Acid
CCEWXXACNPACTXGA

SEQ ID NO: 13791 - protein, 17 aa, Artificial Sequence
  Synthetically generated peptide
  VARIANT (1)..(17): Xaa = Any Amino Acid
CCEWXXACNPACTXXGA

SEQ ID NO: 13792 - protein, 17 aa, Artificial Sequence
  Synthetically generated peptide
  VARIANT (1)..(17): Xaa = Any Amino Acid
CCEWXXACNPACTXGXA

SEQ ID NO: 13793 - protein, 16 aa, Artificial Sequence
  Synthetically generated peptide
  VARIANT (1)..(16): Xaa = Any Amino Acid
CCEWXXACNPACTGXA

SEQ ID NO: 13794 - protein, 17 aa, Artificial Sequence
  Synthetically generated peptide
  VARIANT (1)..(17): Xaa = Any Amino Acid
CCEWXXACNPACTGXXA

SEQ ID NO: 13795 - protein, 15 aa, Artificial Sequence
  Synthetically generated peptide
  VARIANT (1)..(15): Xaa = Any Amino Acid
CCEWXACXNPACTGA

SEQ ID NO: 13796 - protein, 16 aa, Artificial Sequence
  Synthetically generated peptide
  VARIANT (1)..(16): Xaa = Any Amino Acid
CCEWXACXXNPACTGA

SEQ ID NO: 13797 - protein, 17 aa, Artificial Sequence
  Synthetically generated peptide
  VARIANT (1)..(17): Xaa = Any Amino Acid
CCEWXACXXXNPACTGA

SEQ ID NO: 13798 - protein, 17 aa, Artificial Sequence
  Synthetically generated peptide
  VARIANT (1)..(17): Xaa = Any Amino Acid
CCEWXACXXNXPACTGA

SEQ ID NO: 13799 - protein, 17 aa, Artificial Sequence
  Synthetically generated peptide
  VARIANT (1)..(17): Xaa = Any Amino Acid
CCEWXACXXNPXACTGA

SEQ ID NO: 13800 - protein, 17 aa, Artificial Sequence
  Synthetically generated peptide
  VARIANT (1)..(17): Xaa = Any Amino Acid
CCEWXACXXNPAXCTGA

SEQ ID NO: 13801 - protein, 17 aa, Artificial Sequence
  Synthetically generated peptide
  VARIANT (1)..(17): Xaa = Any Amino Acid
CCEWXACXXNPACXTGA

SEQ ID NO: 13802 - protein, 17 aa, Artificial Sequence
  Synthetically generated peptide
  VARIANT (1)..(17): Xaa = Any Amino Acid
CCEWXACXXNPACTXGA

SEQ ID NO: 13803 - protein, 17 aa, Artificial Sequence
  Synthetically generated peptide
  VARIANT (1)..(17): Xaa = Any Amino Acid
CCEWXACXXNPACTGXA

SEQ ID NO: 13804 - protein, 16 aa, Artificial Sequence
  Synthetically generated peptide
  VARIANT (1)..(16): Xaa = Any Amino Acid
CCEWXACXNXPACTGA

SEQ ID NO: 13805 - protein, 17 aa, Artificial Sequence
  Synthetically generated peptide
  VARIANT (1)..(17): Xaa = Any Amino Acid
CCEWXACXNXXPACTGA

SEQ ID NO: 13806 - protein, 17 aa, Artificial Sequence
  Synthetically generated peptide
  VARIANT (1)..(17): Xaa = Any Amino Acid
CCEWXACXNXPXACTGA

SEQ ID NO: 13807 - protein, 17 aa, Artificial Sequence
  Synthetically generated peptide
  VARIANT (1)..(17): Xaa = Any Amino Acid
CCEWXACXNXPAXCTGA

SEQ ID NO: 13808 - protein, 17 aa, Artificial Sequence
  Synthetically generated peptide
  VARIANT (1)..(17): Xaa = Any Amino Acid
CCEWXACXNXPACXTGA

SEQ ID NO: 13809 - protein, 17 aa, Artificial Sequence
  Synthetically generated peptide
  VARIANT (1)..(17): Xaa = Any Amino Acid
CCEWXACXNXPACTXGA

SEQ ID NO: 13810 - protein, 17 aa, Artificial Sequence
  Synthetically generated peptide
  VARIANT (1)..(17): Xaa = Any Amino Acid
CCEWXACXNXPACTGXA

SEQ ID NO: 13811 - protein, 16 aa, Artificial Sequence
  Synthetically generated peptide
  VARIANT (1)..(16): Xaa = Any Amino Acid
CCEWXACXNPXACTGA

SEQ ID NO: 13812 - protein, 17 aa, Artificial Sequence
  Synthetically generated peptide
  VARIANT (1)..(17): Xaa = Any Amino Acid
CCEWXACXNPXXACTGA

SEQ ID NO: 13813 - protein, 17 aa, Artificial Sequence
  Synthetically generated peptide
  VARIANT (1)..(17): Xaa = Any Amino Acid
CCEWXACXNPXAXCTGA

SEQ ID NO: 13814 - protein, 17 aa, Artificial Sequence
  Synthetically generated peptide
  VARIANT (1)..(17): Xaa = Any Amino Acid
CCEWXACXNPXACXTGA

SEQ ID NO: 13815 - protein, 17 aa, Artificial Sequence
  Synthetically generated peptide
  VARIANT (1)..(17): Xaa = Any Amino Acid
CCEWXACXNPXACTXGA

SEQ ID NO: 13816 - protein, 17 aa, Artificial Sequence
  Synthetically generated peptide
  VARIANT (1)..(17): Xaa = Any Amino Acid
CCEWXACXNPXACTGXA

SEQ ID NO: 13817 - protein, 16 aa, Artificial Sequence
  Synthetically generated peptide
  VARIANT (1)..(16): Xaa = Any Amino Acid
CCEWXACXNPAXCTGA

SEQ ID NO: 13818 - protein, 17 aa, Artificial Sequence
  Synthetically generated peptide
  VARIANT (1)..(17): Xaa = Any Amino Acid
CCEWXACXNPAXXCTGA

SEQ ID NO: 13819 - protein, 17 aa, Artificial Sequence
  Synthetically generated peptide
  VARIANT (1)..(17): Xaa = Any Amino Acid
CCEWXACXNPAXCXTGA

SEQ ID NO: 13820 - protein, 17 aa, Artificial Sequence
  Synthetically generated peptide
  VARIANT (1)..(17): Xaa = Any Amino Acid
CCEWXACXNPAXCTXGA

SEQ ID NO: 13821 - protein, 17 aa, Artificial Sequence
  Synthetically generated peptide
  VARIANT (1)..(17): Xaa = Any Amino Acid
CCEWXACXNPAXCTGXA

SEQ ID NO: 13822 - protein, 16 aa, Artificial Sequence
  Synthetically generated peptide
  VARIANT (1)..(16): Xaa = Any Amino Acid
CCEWXACXNPACXTGA

SEQ ID NO: 13823 - protein, 17 aa, Artificial Sequence
  Synthetically generated peptide
  VARIANT (1)..(17): Xaa = Any Amino Acid
CCEWXACXNPACXXTGA

SEQ ID NO: 13824 - protein, 17 aa, Artificial Sequence
  Synthetically generated peptide
  VARIANT (1)..(17): Xaa = Any Amino Acid
CCEWXACXNPACXTXGA

SEQ ID NO: 13825 - protein, 17 aa, Artificial Sequence
  Synthetically generated peptide
  VARIANT (1)..(17): Xaa = Any Amino Acid
CCEWXACXNPACXTGXA

SEQ ID NO: 13826 - protein, 16 aa, Artificial Sequence
  Synthetically generated peptide
  VARIANT (1)..(16): Xaa = Any Amino Acid
CCEWXACXNPACTXGA

SEQ ID NO: 13827 - protein, 17 aa, Artificial Sequence
  Synthetically generated peptide
  VARIANT (1)..(17): Xaa = Any Amino Acid
CCEWXACXNPACTXXGA

SEQ ID NO: 13828 - protein, 17 aa, Artificial Sequence
  Synthetically generated peptide
  VARIANT (1)..(17): Xaa = Any Amino Acid
CCEWXACXNPACTXGXA

SEQ ID NO: 13829 - protein, 16 aa, Artificial Sequence
  Synthetically generated peptide
  VARIANT (1)..(16): Xaa = Any Amino Acid
CCEWXACXNPACTGXA

SEQ ID NO: 13830 - protein, 17 aa, Artificial Sequence
  Synthetically generated peptide
  VARIANT (1)..(17): Xaa = Any Amino Acid
CCEWXACXNPACTGXXA

SEQ ID NO: 13831 - protein, 15 aa, Artificial Sequence
  Synthetically generated peptide
  VARIANT (1)..(15): Xaa = Any Amino Acid
CCEWXACNXPACTGA

SEQ ID NO: 13832 - protein, 16 aa, Artificial Sequence
  Synthetically generated peptide
  VARIANT (1)..(16): Xaa = Any Amino Acid
CCEWXACNXXPACTGA

SEQ ID NO: 13833 - protein, 17 aa, Artificial Sequence
  Synthetically generated peptide
  VARIANT (1)..(17): Xaa = Any Amino Acid
CCEWXACNXXXPACTGA

SEQ ID NO: 13834 - protein, 17 aa, Artificial Sequence
  Synthetically generated peptide
  VARIANT (1)..(17): Xaa = Any Amino Acid
CCEWXACNXXPXACTGA

SEQ ID NO: 13835 - protein, 17 aa, Artificial Sequence
  Synthetically generated peptide
  VARIANT (1)..(17): Xaa = Any Amino Acid
CCEWXACNXXPAXCTGA

SEQ ID NO: 13836 - protein, 17 aa, Artificial Sequence
  Synthetically generated peptide
  VARIANT (1)..(17): Xaa = Any Amino Acid
CCEWXACNXXPACXTGA

SEQ ID NO: 13837 - protein, 17 aa, Artificial Sequence
  Synthetically generated peptide
  VARIANT (1)..(17): Xaa = Any Amino Acid
CCEWXACNXXPACTXGA

SEQ ID NO: 13838 - protein, 17 aa, Artificial Sequence
  Synthetically generated peptide
  VARIANT (1)..(17): Xaa = Any Amino Acid
CCEWXACNXXPACTGXA

SEQ ID NO: 13839 - protein, 16 aa, Artificial Sequence
  Synthetically generated peptide
  VARIANT (1)..(16): Xaa = Any Amino Acid
CCEWXACNXPXACTGA

SEQ ID NO: 13840 - protein, 17 aa, Artificial Sequence
  Synthetically generated peptide
  VARIANT (1)..(17): Xaa = Any Amino Acid
CCEWXACNXPXXACTGA

SEQ ID NO: 13841 - protein, 17 aa, Artificial Sequence
  Synthetically generated peptide
  VARIANT (1)..(17): Xaa = Any Amino Acid
CCEWXACNXPXAXCTGA

SEQ ID NO: 13842 - protein, 17 aa, Artificial Sequence
  Synthetically generated peptide
  VARIANT (1)..(17): Xaa = Any Amino Acid
CCEWXACNXPXACXTGA

SEQ ID NO: 13843 - protein, 17 aa, Artificial Sequence
  Synthetically generated peptide
  VARIANT (1)..(17): Xaa = Any Amino Acid
CCEWXACNXPXACTXGA

SEQ ID NO: 13844 - protein, 17 aa, Artificial Sequence
  Synthetically generated peptide
  VARIANT (1)..(17): Xaa = Any Amino Acid
CCEWXACNXPXACTGXA

SEQ ID NO: 13845 - protein, 16 aa, Artificial Sequence
  Synthetically generated peptide
  VARIANT (1)..(16): Xaa = Any Amino Acid
CCEWXACNXPAXCTGA

SEQ ID NO: 13846 - protein, 17 aa, Artificial Sequence
  Synthetically generated peptide
  VARIANT (1)..(17): Xaa = Any Amino Acid
CCEWXACNXPAXXCTGA

SEQ ID NO: 13847 - protein, 17 aa, Artificial Sequence
  Synthetically generated peptide
  VARIANT (1)..(17): Xaa = Any Amino Acid
CCEWXACNXPAXCXTGA

SEQ ID NO: 13848 - protein, 17 aa, Artificial Sequence
  Synthetically generated peptide
  VARIANT (1)..(17): Xaa = Any Amino Acid
CCEWXACNXPAXCTXGA

SEQ ID NO: 13849 - protein, 17 aa, Artificial Sequence
  Synthetically generated peptide
  VARIANT (1)..(17): Xaa = Any Amino Acid
CCEWXACNXPAXCTGXA

SEQ ID NO: 13850 - protein, 16 aa, Artificial Sequence
  Synthetically generated peptide
  VARIANT (1)..(16): Xaa = Any Amino Acid
CCEWXACNXPACXTGA

SEQ ID NO: 13851 - protein, 17 aa, Artificial Sequence
  Synthetically generated peptide
  VARIANT (1)..(17): Xaa = Any Amino Acid
CCEWXACNXPACXXTGA

SEQ ID NO: 13852 - protein, 17 aa, Artificial Sequence
  Synthetically generated peptide
  VARIANT (1)..(17): Xaa = Any Amino Acid
CCEWXACNXPACXTXGA

SEQ ID NO: 13853 - protein, 17 aa, Artificial Sequence
  Synthetically generated peptide
  VARIANT (1)..(17): Xaa = Any Amino Acid
CCEWXACNXPACXTGXA

SEQ ID NO: 13854 - protein, 16 aa, Artificial Sequence
  Synthetically generated peptide
  VARIANT (1)..(16): Xaa = Any Amino Acid
CCEWXACNXPACTXGA

SEQ ID NO: 13855 - protein, 17 aa, Artificial Sequence
  Synthetically generated peptide
  VARIANT (1)..(17): Xaa = Any Amino Acid
CCEWXACNXPACTXXGA

SEQ ID NO: 13856 - protein, 17 aa, Artificial Sequence
  Synthetically generated peptide
  VARIANT (1)..(17): Xaa = Any Amino Acid
CCEWXACNXPACTXGXA

SEQ ID NO: 13857 - protein, 16 aa, Artificial Sequence
  Synthetically generated peptide
  VARIANT (1)..(16): Xaa = Any Amino Acid
CCEWXACNXPACTGXA

SEQ ID NO: 13858 - protein, 17 aa, Artificial Sequence
  Synthetically generated peptide
  VARIANT (1)..(17): Xaa = Any Amino Acid
CCEWXACNXPACTGXXA

SEQ ID NO: 13859 - protein, 15 aa, Artificial Sequence
  Synthetically generated peptide
  VARIANT (1)..(15): Xaa = Any Amino Acid
CCEWXACNPXACTGA

SEQ ID NO: 13860 - protein, 16 aa, Artificial Sequence
  Synthetically generated peptide
  VARIANT (1)..(16): Xaa = Any Amino Acid
CCEWXACNPXXACTGA

SEQ ID NO: 13861 - protein, 17 aa, Artificial Sequence
  Synthetically generated peptide
  VARIANT (1)..(17): Xaa = Any Amino Acid
CCEWXACNPXXXACTGA

SEQ ID NO: 13862 - protein, 17 aa, Artificial Sequence
  Synthetically generated peptide
  VARIANT (1)..(17): Xaa = Any Amino Acid
CCEWXACNPXXAXCTGA

SEQ ID NO: 13863 - protein, 17 aa, Artificial Sequence
  Synthetically generated peptide
  VARIANT (1)..(17): Xaa = Any Amino Acid
CCEWXACNPXXACXTGA

SEQ ID NO: 13864 - protein, 17 aa, Artificial Sequence
  Synthetically generated peptide
  VARIANT (1)..(17): Xaa = Any Amino Acid
CCEWXACNPXXACTXGA

SEQ ID NO: 13865 - protein, 17 aa, Artificial Sequence
  Synthetically generated peptide
  VARIANT (1)..(17): Xaa = Any Amino Acid
CCEWXACNPXXACTGXA

SEQ ID NO: 13866 - protein, 16 aa, Artificial Sequence
  Synthetically generated peptide
  VARIANT (1)..(16): Xaa = Any Amino Acid
CCEWXACNPXAXCTGA

SEQ ID NO: 13867 - protein, 17 aa, Artificial Sequence
  Synthetically generated peptide
  VARIANT (1)..(17): Xaa = Any Amino Acid
CCEWXACNPXAXXCTGA

SEQ ID NO: 13868 - protein, 17 aa, Artificial Sequence
  Synthetically generated peptide
  VARIANT (1)..(17): Xaa = Any Amino Acid
CCEWXACNPXAXCXTGA

SEQ ID NO: 13869 - protein, 17 aa, Artificial Sequence
  Synthetically generated peptide
  VARIANT (1)..(17): Xaa = Any Amino Acid
CCEWXACNPXAXCTXGA

SEQ ID NO: 13870 - protein, 17 aa, Artificial Sequence
  Synthetically generated peptide
  VARIANT (1)..(17): Xaa = Any Amino Acid
CCEWXACNPXAXCTGXA

SEQ ID NO: 13871 - protein, 16 aa, Artificial Sequence
  Synthetically generated peptide
  VARIANT (1)..(16): Xaa = Any Amino Acid
CCEWXACNPXACXTGA

SEQ ID NO: 13872 - protein, 17 aa, Artificial Sequence
  Synthetically generated peptide
  VARIANT (1)..(17): Xaa = Any Amino Acid
CCEWXACNPXACXXTGA

SEQ ID NO: 13873 - protein, 17 aa, Artificial Sequence
  Synthetically generated peptide
  VARIANT (1)..(17): Xaa = Any Amino Acid
CCEWXACNPXACXTXGA

SEQ ID NO: 13874 - protein, 17 aa, Artificial Sequence
  Synthetically generated peptide
  VARIANT (1)..(17): Xaa = Any Amino Acid
CCEWXACNPXACXTGXA

SEQ ID NO: 13875 - protein, 16 aa, Artificial Sequence
  Synthetically generated peptide
  VARIANT (1)..(16): Xaa = Any Amino Acid
CCEWXACNPXACTXGA

SEQ ID NO: 13876 - protein, 17 aa, Artificial Sequence
  Synthetically generated peptide
  VARIANT (1)..(17): Xaa = Any Amino Acid
CCEWXACNPXACTXXGA

SEQ ID NO: 13877 - protein, 17 aa, Artificial Sequence
  Synthetically generated peptide
  VARIANT (1)..(17): Xaa = Any Amino Acid
CCEWXACNPXACTXGXA

SEQ ID NO: 13878 - protein, 16 aa, Artificial Sequence
  Synthetically generated peptide
  VARIANT (1)..(16): Xaa = Any Amino Acid
CCEWXACNPXACTGXA

SEQ ID NO: 13879 - protein, 17 aa, Artificial Sequence
  Synthetically generated peptide
  VARIANT (1)..(17): Xaa = Any Amino Acid
CCEWXACNPXACTGXXA

SEQ ID NO: 13880 - protein, 15 aa, Artificial Sequence
  Synthetically generated peptide
  VARIANT (1)..(15): Xaa = Any Amino Acid
CCEWXACNPAXCTGA

SEQ ID NO: 13881 - protein, 16 aa, Artificial Sequence
  Synthetically generated peptide
  VARIANT (1)..(16): Xaa = Any Amino Acid
CCEWXACNPAXXCTGA

SEQ ID NO: 13882 - protein, 17 aa, Artificial Sequence
  Synthetically generated peptide
  VARIANT (1)..(17): Xaa = Any Amino Acid
CCEWXACNPAXXXCTGA

SEQ ID NO: 13883 - protein, 17 aa, Artificial Sequence
  Synthetically generated peptide
  VARIANT (1)..(17): Xaa = Any Amino Acid
CCEWXACNPAXXCXTGA

SEQ ID NO: 13884 - protein, 17 aa, Artificial Sequence
  Synthetically generated peptide
  VARIANT (1)..(17): Xaa = Any Amino Acid
CCEWXACNPAXXCTXGA

SEQ ID NO: 13885 - protein, 17 aa, Artificial Sequence
  Synthetically generated peptide
  VARIANT (1)..(17): Xaa = Any Amino Acid
CCEWXACNPAXXCTGXA

SEQ ID NO: 13886 - protein, 16 aa, Artificial Sequence
  Synthetically generated peptide
  VARIANT (1)..(16): Xaa = Any Amino Acid
CCEWXACNPAXCXTGA

SEQ ID NO: 13887 - protein, 17 aa, Artificial Sequence
  Synthetically generated peptide
  VARIANT (1)..(17): Xaa = Any Amino Acid
CCEWXACNPAXCXXTGA

SEQ ID NO: 13888 - protein, 17 aa, Artificial Sequence
  Synthetically generated peptide
  VARIANT (1)..(17): Xaa = Any Amino Acid
CCEWXACNPAXCXTXGA

SEQ ID NO: 13889 - protein, 17 aa, Artificial Sequence
  Synthetically generated peptide
  VARIANT (1)..(17): Xaa = Any Amino Acid
CCEWXACNPAXCXTGXA

SEQ ID NO: 13890 - protein, 16 aa, Artificial Sequence
  Synthetically generated peptide
  VARIANT (1)..(16): Xaa = Any Amino Acid
CCEWXACNPAXCTXGA

SEQ ID NO: 13891 - protein, 17 aa, Artificial Sequence
  Synthetically generated peptide
  VARIANT (1)..(17): Xaa = Any Amino Acid
CCEWXACNPAXCTXXGA

SEQ ID NO: 13892 - protein, 17 aa, Artificial Sequence
  Synthetically generated peptide
  VARIANT (1)..(17): Xaa = Any Amino Acid
CCEWXACNPAXCTXGXA

SEQ ID NO: 13893 - protein, 16 aa, Artificial Sequence
  Synthetically generated peptide
  VARIANT (1)..(16): Xaa = Any Amino Acid
CCEWXACNPAXCTGXA

SEQ ID NO: 13894 - protein, 17 aa, Artificial Sequence
  Synthetically generated peptide
  VARIANT (1)..(17): Xaa = Any Amino Acid
CCEWXACNPAXCTGXXA

SEQ ID NO: 13895 - protein, 15 aa, Artificial Sequence
  Synthetically generated peptide
  VARIANT (1)..(15): Xaa = Any Amino Acid
CCEWXACNPACXTGA

SEQ ID NO: 13896 - protein, 16 aa, Artificial Sequence
  Synthetically generated peptide
  VARIANT (1)..(16): Xaa = Any Amino Acid
CCEWXACNPACXXTGA

SEQ ID NO: 13897 - protein, 17 aa, Artificial Sequence
  Synthetically generated peptide
  VARIANT (1)..(17): Xaa = Any Amino Acid
CCEWXACNPACXXXTGA

SEQ ID NO: 13898 - protein, 17 aa, Artificial Sequence
  Synthetically generated peptide
  VARIANT (1)..(17): Xaa = Any Amino Acid
CCEWXACNPACXXTXGA

SEQ ID NO: 13899 - protein, 17 aa, Artificial Sequence
  Synthetically generated peptide
  VARIANT (1)..(17): Xaa = Any Amino Acid
CCEWXACNPACXXTGXA

SEQ ID NO: 13900 - protein, 16 aa, Artificial Sequence
  Synthetically generated peptide
  VARIANT (1)..(16): Xaa = Any Amino Acid
CCEWXACNPACXTXGA

SEQ ID NO: 13901 - protein, 17 aa, Artificial Sequence
  Synthetically generated peptide
  VARIANT (1)..(17): Xaa = Any Amino Acid
CCEWXACNPACXTXXGA

SEQ ID NO: 13902 - protein, 17 aa, Artificial Sequence
  Synthetically generated peptide
  VARIANT (1)..(17): Xaa = Any Amino Acid
CCEWXACNPACXTXGXA

SEQ ID NO: 13903 - protein, 16 aa, Artificial Sequence
  Synthetically generated peptide
  VARIANT (1)..(16): Xaa = Any Amino Acid
CCEWXACNPACXTGXA

SEQ ID NO: 13904 - protein, 17 aa, Artificial Sequence
  Synthetically generated peptide
  VARIANT (1)..(17): Xaa = Any Amino Acid
CCEWXACNPACXTGXXA

SEQ ID NO: 13905 - protein, 15 aa, Artificial Sequence
  Synthetically generated peptide
  VARIANT (1)..(15): Xaa = Any Amino Acid
CCEWXACNPACTXGA

SEQ ID NO: 13906 - protein, 16 aa, Artificial Sequence
  Synthetically generated peptide
  VARIANT (1)..(16): Xaa = Any Amino Acid
CCEWXACNPACTXXGA

SEQ ID NO: 13907 - protein, 17 aa, Artificial Sequence
  Synthetically generated peptide
  VARIANT (1)..(17): Xaa = Any Amino Acid
CCEWXACNPACTXXXGA

SEQ ID NO: 13908 - protein, 17 aa, Artificial Sequence
  Synthetically generated peptide
  VARIANT (1)..(17): Xaa = Any Amino Acid
CCEWXACNPACTXXGXA

SEQ ID NO: 13909 - protein, 16 aa, Artificial Sequence
  Synthetically generated peptide
  VARIANT (1)..(16): Xaa = Any Amino Acid
CCEWXACNPACTXGXA

SEQ ID NO: 13910 - protein, 17 aa, Artificial Sequence
  Synthetically generated peptide
  VARIANT (1)..(17): Xaa = Any Amino Acid
CCEWXACNPACTXGXXA

SEQ ID NO: 13911 - protein, 15 aa, Artificial Sequence
  Synthetically generated peptide
  VARIANT (1)..(15): Xaa = Any Amino Acid
CCEWXACNPACTGXA

SEQ ID NO: 13912 - protein, 16 aa, Artificial Sequence
  Synthetically generated peptide
  VARIANT (1)..(16): Xaa = Any Amino Acid
CCEWXACNPACTGXXA

SEQ ID NO: 13913 - protein, 17 aa, Artificial Sequence
  Synthetically generated peptide
  VARIANT (1)..(17): Xaa = Any Amino Acid
CCEWXACNPACTGXXXA

SEQ ID NO: 13914 - protein, 14 aa, Artificial Sequence
  Synthetically generated peptide
  VARIANT (1)..(14): Xaa = Any Amino Acid
CCEWACXNPACTGA

SEQ ID NO: 13915 - protein, 15 aa, Artificial Sequence
  Synthetically generated peptide
  VARIANT (1)..(15): Xaa = Any Amino Acid
CCEWACXXNPACTGA

SEQ ID NO: 13916 - protein, 16 aa, Artificial Sequence
  Synthetically generated peptide
  VARIANT (1)..(16): Xaa = Any Amino Acid
CCEWACXXXNPACTGA

SEQ ID NO: 13917 - protein, 17 aa, Artificial Sequence
  Synthetically generated peptide
  VARIANT (1)..(17): Xaa = Any Amino Acid
CCEWACXXXXNPACTGA

SEQ ID NO: 13918 - protein, 17 aa, Artificial Sequence
  Synthetically generated peptide
  VARIANT (1)..(17): Xaa = Any Amino Acid
CCEWACXXXNXPACTGA

SEQ ID NO: 13919 - protein, 17 aa, Artificial Sequence
  Synthetically generated peptide
  VARIANT (1)..(17): Xaa = Any Amino Acid
CCEWACXXXNPXACTGA

SEQ ID NO: 13920 - protein, 17 aa, Artificial Sequence
  Synthetically generated peptide
  VARIANT (1)..(17): Xaa = Any Amino Acid
CCEWACXXXNPAXCTGA

SEQ ID NO: 13921 - protein, 17 aa, Artificial Sequence
  Synthetically generated peptide
  VARIANT (1)..(17): Xaa = Any Amino Acid
CCEWACXXXNPACXTGA

SEQ ID NO: 13922 - protein, 17 aa, Artificial Sequence
  Synthetically generated peptide
  VARIANT (1)..(17): Xaa = Any Amino Acid
CCEWACXXXNPACTXGA

SEQ ID NO: 13923 - protein, 17 aa, Artificial Sequence
  Synthetically generated peptide
  VARIANT (1)..(17): Xaa = Any Amino Acid
CCEWACXXXNPACTGXA

SEQ ID NO: 13924 - protein, 16 aa, Artificial Sequence
  Synthetically generated peptide
  VARIANT (1)..(16): Xaa = Any Amino Acid
CCEWACXXNXPACTGA

SEQ ID NO: 13925 - protein, 17 aa, Artificial Sequence
  Synthetically generated peptide
  VARIANT (1)..(17): Xaa = Any Amino Acid
CCEWACXXNXXPACTGA

SEQ ID NO: 13926 - protein, 17 aa, Artificial Sequence
  Synthetically generated peptide
  VARIANT (1)..(17): Xaa = Any Amino Acid
CCEWACXXNXPXACTGA

SEQ ID NO: 13927 - protein, 17 aa, Artificial Sequence
  Synthetically generated peptide
  VARIANT (1)..(17): Xaa = Any Amino Acid
CCEWACXXNXPAXCTGA

SEQ ID NO: 13928 - protein, 17 aa, Artificial Sequence
  Synthetically generated peptide
  VARIANT (1)..(17): Xaa = Any Amino Acid
CCEWACXXNXPACXTGA

SEQ ID NO: 13929 - protein, 17 aa, Artificial Sequence
  Synthetically generated peptide
  VARIANT (1)..(17): Xaa = Any Amino Acid
CCEWACXXNXPACTXGA

SEQ ID NO: 13930 - protein, 17 aa, Artificial Sequence
  Synthetically generated peptide
  VARIANT (1)..(17): Xaa = Any Amino Acid
CCEWACXXNXPACTGXA

SEQ ID NO: 13931 - protein, 16 aa, Artificial Sequence
  Synthetically generated peptide
  VARIANT (1)..(16): Xaa = Any Amino Acid
CCEWACXXNPXACTGA

SEQ ID NO: 13932 - protein, 17 aa, Artificial Sequence
  Synthetically generated peptide
  VARIANT (1)..(17): Xaa = Any Amino Acid
CCEWACXXNPXXACTGA

SEQ ID NO: 13933 - protein, 17 aa, Artificial Sequence
  Synthetically generated peptide
  VARIANT (1)..(17): Xaa = Any Amino Acid
CCEWACXXNPXAXCTGA

SEQ ID NO: 13934 - protein, 17 aa, Artificial Sequence
  Synthetically generated peptide
  VARIANT (1)..(17): Xaa = Any Amino Acid
CCEWACXXNPXACXTGA

SEQ ID NO: 13935 - protein, 17 aa, Artificial Sequence
  Synthetically generated peptide
  VARIANT (1)..(17): Xaa = Any Amino Acid
CCEWACXXNPXACTXGA

SEQ ID NO: 13936 - protein, 17 aa, Artificial Sequence
  Synthetically generated peptide
  VARIANT (1)..(17): Xaa = Any Amino Acid
CCEWACXXNPXACTGXA

SEQ ID NO: 13937 - protein, 16 aa, Artificial Sequence
  Synthetically generated peptide
  VARIANT (1)..(16): Xaa = Any Amino Acid
CCEWACXXNPAXCTGA

SEQ ID NO: 13938 - protein, 17 aa, Artificial Sequence
  Synthetically generated peptide
  VARIANT (1)..(17): Xaa = Any Amino Acid
CCEWACXXNPAXXCTGA

SEQ ID NO: 13939 - protein, 17 aa, Artificial Sequence
  Synthetically generated peptide
  VARIANT (1)..(17): Xaa = Any Amino Acid
CCEWACXXNPAXCXTGA

SEQ ID NO: 13940 - protein, 17 aa, Artificial Sequence
  Synthetically generated peptide
  VARIANT (1)..(17): Xaa = Any Amino Acid
CCEWACXXNPAXCTXGA

SEQ ID NO: 13941 - protein, 17 aa, Artificial Sequence
  Synthetically generated peptide
  VARIANT (1)..(17): Xaa = Any Amino Acid
CCEWACXXNPAXCTGXA

SEQ ID NO: 13942 - protein, 16 aa, Artificial Sequence
  Synthetically generated peptide
  VARIANT (1)..(16): Xaa = Any Amino Acid
CCEWACXXNPACXTGA

SEQ ID NO: 13943 - protein, 17 aa, Artificial Sequence
  Synthetically generated peptide
  VARIANT (1)..(17): Xaa = Any Amino Acid
CCEWACXXNPACXXTGA

SEQ ID NO: 13944 - protein, 17 aa, Artificial Sequence
  Synthetically generated peptide
  VARIANT (1)..(17): Xaa = Any Amino Acid
CCEWACXXNPACXTXGA

SEQ ID NO: 13945 - protein, 17 aa, Artificial Sequence
  Synthetically generated peptide
  VARIANT (1)..(17): Xaa = Any Amino Acid
CCEWACXXNPACXTGXA

SEQ ID NO: 13946 - protein, 16 aa, Artificial Sequence
  Synthetically generated peptide
  VARIANT (1)..(16): Xaa = Any Amino Acid
CCEWACXXNPACTXGA

SEQ ID NO: 13947 - protein, 17 aa, Artificial Sequence
  Synthetically generated peptide
  VARIANT (1)..(17): Xaa = Any Amino Acid
CCEWACXXNPACTXXGA

SEQ ID NO: 13948 - protein, 17 aa, Artificial Sequence
  Synthetically generated peptide
  VARIANT (1)..(17): Xaa = Any Amino Acid
CCEWACXXNPACTXGXA

SEQ ID NO: 13949 - protein, 16 aa, Artificial Sequence
  Synthetically generated peptide
  VARIANT (1)..(16): Xaa = Any Amino Acid
CCEWACXXNPACTGXA

SEQ ID NO: 13950 - protein, 17 aa, Artificial Sequence
  Synthetically generated peptide
  VARIANT (1)..(17): Xaa = Any Amino Acid
CCEWACXXNPACTGXXA

SEQ ID NO: 13951 - protein, 15 aa, Artificial Sequence
  Synthetically generated peptide
  VARIANT (1)..(15): Xaa = Any Amino Acid
CCEWACXNXPACTGA

SEQ ID NO: 13952 - protein, 16 aa, Artificial Sequence
  Synthetically generated peptide
  VARIANT (1)..(16): Xaa = Any Amino Acid
CCEWACXNXXPACTGA

SEQ ID NO: 13953 - protein, 17 aa, Artificial Sequence
  Synthetically generated peptide
  VARIANT (1)..(17): Xaa = Any Amino Acid
CCEWACXNXXXPACTGA

SEQ ID NO: 13954 - protein, 17 aa, Artificial Sequence
  Synthetically generated peptide
  VARIANT (1)..(17): Xaa = Any Amino Acid
CCEWACXNXXPXACTGA

SEQ ID NO: 13955 - protein, 17 aa, Artificial Sequence
  Synthetically generated peptide
  VARIANT (1)..(17): Xaa = Any Amino Acid
CCEWACXNXXPAXCTGA

SEQ ID NO: 13956 - protein, 17 aa, Artificial Sequence
  Synthetically generated peptide
  VARIANT (1)..(17): Xaa = Any Amino Acid
CCEWACXNXXPACXTGA

SEQ ID NO: 13957 - protein, 17 aa, Artificial Sequence
  Synthetically generated peptide
  VARIANT (1)..(17): Xaa = Any Amino Acid
CCEWACXNXXPACTXGA

SEQ ID NO: 13958 - protein, 17 aa, Artificial Sequence
  Synthetically generated peptide
  VARIANT (1)..(17): Xaa = Any Amino Acid
CCEWACXNXXPACTGXA

SEQ ID NO: 13959 - protein, 16 aa, Artificial Sequence
  Synthetically generated peptide
  VARIANT (1)..(16): Xaa = Any Amino Acid
CCEWACXNXPXACTGA

SEQ ID NO: 13960 - protein, 17 aa, Artificial Sequence
  Synthetically generated peptide
  VARIANT (1)..(17): Xaa = Any Amino Acid
CCEWACXNXPXXACTGA

SEQ ID NO: 13961 - protein, 17 aa, Artificial Sequence
  Synthetically generated peptide
  VARIANT (1)..(17): Xaa = Any Amino Acid
CCEWACXNXPXAXCTGA

SEQ ID NO: 13962 - protein, 17 aa, Artificial Sequence
  Synthetically generated peptide
  VARIANT (1)..(17): Xaa = Any Amino Acid
CCEWACXNXPXACXTGA

SEQ ID NO: 13963 - protein, 17 aa, Artificial Sequence
  Synthetically generated peptide
  VARIANT (1)..(17): Xaa = Any Amino Acid
CCEWACXNXPXACTXGA

SEQ ID NO: 13964 - protein, 17 aa, Artificial Sequence
  Synthetically generated peptide
  VARIANT (1)..(17): Xaa = Any Amino Acid
CCEWACXNXPXACTGXA

SEQ ID NO: 13965 - protein, 16 aa, Artificial Sequence
  Synthetically generated peptide
  VARIANT (1)..(16): Xaa = Any Amino Acid
CCEWACXNXPAXCTGA

SEQ ID NO: 13966 - protein, 17 aa, Artificial Sequence
  Synthetically generated peptide
  VARIANT (1)..(17): Xaa = Any Amino Acid
CCEWACXNXPAXXCTGA

SEQ ID NO: 13967 - protein, 17 aa, Artificial Sequence
  Synthetically generated peptide
  VARIANT (1)..(17): Xaa = Any Amino Acid
CCEWACXNXPAXCXTGA

SEQ ID NO: 13968 - protein, 17 aa, Artificial Sequence
  Synthetically generated peptide
  VARIANT (1)..(17): Xaa = Any Amino Acid
CCEWACXNXPAXCTXGA

SEQ ID NO: 13969 - protein, 17 aa, Artificial Sequence
  Synthetically generated peptide
  VARIANT (1)..(17): Xaa = Any Amino Acid
CCEWACXNXPAXCTGXA

SEQ ID NO: 13970 - protein, 16 aa, Artificial Sequence
  Synthetically generated peptide
  VARIANT (1)..(16): Xaa = Any Amino Acid
CCEWACXNXPACXTGA

SEQ ID NO: 13971 - protein, 17 aa, Artificial Sequence
  Synthetically generated peptide
  VARIANT (1)..(17): Xaa = Any Amino Acid
CCEWACXNXPACXXTGA

SEQ ID NO: 13972 - protein, 17 aa, Artificial Sequence
  Synthetically generated peptide
  VARIANT (1)..(17): Xaa = Any Amino Acid
CCEWACXNXPACXTXGA

SEQ ID NO: 13973 - protein, 17 aa, Artificial Sequence
  Synthetically generated peptide
  VARIANT (1)..(17): Xaa = Any Amino Acid
CCEWACXNXPACXTGXA

SEQ ID NO: 13974 - protein, 16 aa, Artificial Sequence
  Synthetically generated peptide
  VARIANT (1)..(16): Xaa = Any Amino Acid
CCEWACXNXPACTXGA

SEQ ID NO: 13975 - protein, 17 aa, Artificial Sequence
  Synthetically generated peptide
  VARIANT (1)..(17): Xaa = Any Amino Acid
CCEWACXNXPACTXXGA

SEQ ID NO: 13976 - protein, 17 aa, Artificial Sequence
  Synthetically generated peptide
  VARIANT (1)..(17): Xaa = Any Amino Acid
CCEWACXNXPACTXGXA

SEQ ID NO: 13977 - protein, 16 aa, Artificial Sequence
  Synthetically generated peptide
  VARIANT (1)..(16): Xaa = Any Amino Acid
CCEWACXNXPACTGXA

SEQ ID NO: 13978 - protein, 17 aa, Artificial Sequence
  Synthetically generated peptide
  VARIANT (1)..(17): Xaa = Any Amino Acid
CCEWACXNXPACTGXXA

SEQ ID NO: 13979 - protein, 15 aa, Artificial Sequence
  Synthetically generated peptide
  VARIANT (1)..(15): Xaa = Any Amino Acid
CCEWACXNPXACTGA

SEQ ID NO: 13980 - protein, 16 aa, Artificial Sequence
  Synthetically generated peptide
  VARIANT (1)..(16): Xaa = Any Amino Acid
CCEWACXNPXXACTGA

SEQ ID NO: 13981 - protein, 17 aa, Artificial Sequence
  Synthetically generated peptide
  VARIANT (1)..(17): Xaa = Any Amino Acid
CCEWACXNPXXXACTGA

SEQ ID NO: 13982 - protein, 17 aa, Artificial Sequence
  Synthetically generated peptide
  VARIANT (1)..(17): Xaa = Any Amino Acid
CCEWACXNPXXAXCTGA

SEQ ID NO: 13983 - protein, 17 aa, Artificial Sequence
  Synthetically generated peptide
  VARIANT (1)..(17): Xaa = Any Amino Acid
CCEWACXNPXXACXTGA

SEQ ID NO: 13984 - protein, 17 aa, Artificial Sequence
  Synthetically generated peptide
  VARIANT (1)..(17): Xaa = Any Amino Acid
CCEWACXNPXXACTXGA

SEQ ID NO: 13985 - protein, 17 aa, Artificial Sequence
  Synthetically generated peptide
  VARIANT (1)..(17): Xaa = Any Amino Acid
CCEWACXNPXXACTGXA

SEQ ID NO: 13986 - protein, 16 aa, Artificial Sequence
  Synthetically generated peptide
  VARIANT (1)..(16): Xaa = Any Amino Acid
CCEWACXNPXAXCTGA

SEQ ID NO: 13987 - protein, 17 aa, Artificial Sequence
  Synthetically generated peptide
  VARIANT (1)..(17): Xaa = Any Amino Acid
CCEWACXNPXAXXCTGA

SEQ ID NO: 13988 - protein, 17 aa, Artificial Sequence
  Synthetically generated peptide
  VARIANT (1)..(17): Xaa = Any Amino Acid
CCEWACXNPXAXCXTGA

SEQ ID NO: 13989 - protein, 17 aa, Artificial Sequence
  Synthetically generated peptide
  VARIANT (1)..(17): Xaa = Any Amino Acid
CCEWACXNPXAXCTXGA

SEQ ID NO: 13990 - protein, 17 aa, Artificial Sequence
  Synthetically generated peptide
  VARIANT (1)..(17): Xaa = Any Amino Acid
CCEWACXNPXAXCTGXA

SEQ ID NO: 13991 - protein, 16 aa, Artificial Sequence
  Synthetically generated peptide
  VARIANT (1)..(16): Xaa = Any Amino Acid
CCEWACXNPXACXTGA

SEQ ID NO: 13992 - protein, 17 aa, Artificial Sequence
  Synthetically generated peptide
  VARIANT (1)..(17): Xaa = Any Amino Acid
CCEWACXNPXACXXTGA

SEQ ID NO: 13993 - protein, 17 aa, Artificial Sequence
  Synthetically generated peptide
  VARIANT (1)..(17): Xaa = Any Amino Acid
CCEWACXNPXACXTXGA

SEQ ID NO: 13994 - protein, 17 aa, Artificial Sequence
  Synthetically generated peptide
  VARIANT (1)..(17): Xaa = Any Amino Acid
CCEWACXNPXACXTGXA

SEQ ID NO: 13995 - protein, 16 aa, Artificial Sequence
  Synthetically generated peptide
  VARIANT (1)..(16): Xaa = Any Amino Acid
CCEWACXNPXACTXGA

SEQ ID NO: 13996 - protein, 17 aa, Artificial Sequence
  Synthetically generated peptide
  VARIANT (1)..(17): Xaa = Any Amino Acid
CCEWACXNPXACTXXGA

SEQ ID NO: 13997 - protein, 17 aa, Artificial Sequence
  Synthetically generated peptide
  VARIANT (1)..(17): Xaa = Any Amino Acid
CCEWACXNPXACTXGXA

SEQ ID NO: 13998 - protein, 16 aa, Artificial Sequence
  Synthetically generated peptide
  VARIANT (1)..(16): Xaa = Any Amino Acid
CCEWACXNPXACTGXA

SEQ ID NO: 13999 - protein, 17 aa, Artificial Sequence
  Synthetically generated peptide
  VARIANT (1)..(17): Xaa = Any Amino Acid
CCEWACXNPXACTGXXA

SEQ ID NO: 14000 - protein, 15 aa, Artificial Sequence
  Synthetically generated peptide
  VARIANT (1)..(15): Xaa = Any Amino Acid
CCEWACXNPAXCTGA

SEQ ID NO: 14001 - protein, 16 aa, Artificial Sequence
  Synthetically generated peptide
  VARIANT (1)..(16): Xaa = Any Amino Acid
CCEWACXNPAXXCTGA

SEQ ID NO: 14002 - protein, 17 aa, Artificial Sequence
  Synthetically generated peptide
  VARIANT (1)..(17): Xaa = Any Amino Acid
CCEWACXNPAXXXCTGA

SEQ ID NO: 14003 - protein, 17 aa, Artificial Sequence
  Synthetically generated peptide
  VARIANT (1)..(17): Xaa = Any Amino Acid
CCEWACXNPAXXCXTGA

SEQ ID NO: 14004 - protein, 17 aa, Artificial Sequence
  Synthetically generated peptide
  VARIANT (1)..(17): Xaa = Any Amino Acid
CCEWACXNPAXXCTXGA

SEQ ID NO: 14005 - protein, 17 aa, Artificial Sequence
  Synthetically generated peptide
  VARIANT (1)..(17): Xaa = Any Amino Acid
CCEWACXNPAXXCTGXA

SEQ ID NO: 14006 - protein, 16 aa, Artificial Sequence
  Synthetically generated peptide
  VARIANT (1)..(16): Xaa = Any Amino Acid
CCEWACXNPAXCXTGA

SEQ ID NO: 14007 - protein, 17 aa, Artificial Sequence
  Synthetically generated peptide
  VARIANT (1)..(17): Xaa = Any Amino Acid
CCEWACXNPAXCXXTGA

SEQ ID NO: 14008 - protein, 17 aa, Artificial Sequence
  Synthetically generated peptide
  VARIANT (1)..(17): Xaa = Any Amino Acid
CCEWACXNPAXCXTXGA

SEQ ID NO: 14009 - protein, 17 aa, Artificial Sequence
  Synthetically generated peptide
  VARIANT (1)..(17): Xaa = Any Amino Acid
CCEWACXNPAXCXTGXA

SEQ ID NO: 14010 - protein, 16 aa, Artificial Sequence
  Synthetically generated peptide
  VARIANT (1)..(16): Xaa = Any Amino Acid
CCEWACXNPAXCTXGA

SEQ ID NO: 14011 - protein, 17 aa, Artificial Sequence
  Synthetically generated peptide
  VARIANT (1)..(17): Xaa = Any Amino Acid
CCEWACXNPAXCTXXGA

SEQ ID NO: 14012 - protein, 17 aa, Artificial Sequence
  Synthetically generated peptide
  VARIANT (1)..(17): Xaa = Any Amino Acid
CCEWACXNPAXCTXGXA

SEQ ID NO: 14013 - protein, 16 aa, Artificial Sequence
  Synthetically generated peptide
  VARIANT (1)..(16): Xaa = Any Amino Acid
CCEWACXNPAXCTGXA

SEQ ID NO: 14014 - protein, 17 aa, Artificial Sequence
  Synthetically generated peptide
  VARIANT (1)..(17): Xaa = Any Amino Acid
CCEWACXNPAXCTGXXA

SEQ ID NO: 14015 - protein, 15 aa, Artificial Sequence
  Synthetically generated peptide
  VARIANT (1)..(15): Xaa = Any Amino Acid
CCEWACXNPACXTGA

SEQ ID NO: 14016 - protein, 16 aa, Artificial Sequence
  Synthetically generated peptide
  VARIANT (1)..(16): Xaa = Any Amino Acid
CCEWACXNPACXXTGA

SEQ ID NO: 14017 - protein, 17 aa, Artificial Sequence
  Synthetically generated peptide
  VARIANT (1)..(17): Xaa = Any Amino Acid
CCEWACXNPACXXXTGA

SEQ ID NO: 14018 - protein, 17 aa, Artificial Sequence
  Synthetically generated peptide
  VARIANT (1)..(17): Xaa = Any Amino Acid
CCEWACXNPACXXTXGA

SEQ ID NO: 14019 - protein, 17 aa, Artificial Sequence
  Synthetically generated peptide
  VARIANT (1)..(17): Xaa = Any Amino Acid
CCEWACXNPACXXTGXA

SEQ ID NO: 14020 - protein, 16 aa, Artificial Sequence
  Synthetically generated peptide
  VARIANT (1)..(16): Xaa = Any Amino Acid
CCEWACXNPACXTXGA

SEQ ID NO: 14021 - protein, 17 aa, Artificial Sequence
  Synthetically generated peptide
  VARIANT (1)..(17): Xaa = Any Amino Acid
CCEWACXNPACXTXXGA

SEQ ID NO: 14022 - protein, 17 aa, Artificial Sequence
  Synthetically generated peptide
  VARIANT (1)..(17): Xaa = Any Amino Acid
CCEWACXNPACXTXGXA

SEQ ID NO: 14023 - protein, 16 aa, Artificial Sequence
  Synthetically generated peptide
  VARIANT (1)..(16): Xaa = Any Amino Acid
CCEWACXNPACXTGXA

SEQ ID NO: 14024 - protein, 17 aa, Artificial Sequence
  Synthetically generated peptide
  VARIANT (1)..(17): Xaa = Any Amino Acid
CCEWACXNPACXTGXXA

SEQ ID NO: 14025 - protein, 15 aa, Artificial Sequence
  Synthetically generated peptide
  VARIANT (1)..(15): Xaa = Any Amino Acid
CCEWACXNPACTXGA

SEQ ID NO: 14026 - protein, 16 aa, Artificial Sequence
  Synthetically generated peptide
  VARIANT (1)..(16): Xaa = Any Amino Acid
CCEWACXNPACTXXGA

SEQ ID NO: 14027 - protein, 17 aa, Artificial Sequence
  Synthetically generated peptide
  VARIANT (1)..(17): Xaa = Any Amino Acid
CCEWACXNPACTXXXGA

SEQ ID NO: 14028 - protein, 17 aa, Artificial Sequence
  Synthetically generated peptide
  VARIANT (1)..(17): Xaa = Any Amino Acid
CCEWACXNPACTXXGXA

SEQ ID NO: 14029 - protein, 16 aa, Artificial Sequence
  Synthetically generated peptide
  VARIANT (1)..(16): Xaa = Any Amino Acid
CCEWACXNPACTXGXA

SEQ ID NO: 14030 - protein, 17 aa, Artificial Sequence
  Synthetically generated peptide
  VARIANT (1)..(17): Xaa = Any Amino Acid
CCEWACXNPACTXGXXA

SEQ ID NO: 14031 - protein, 15 aa, Artificial Sequence
  Synthetically generated peptide
  VARIANT (1)..(15): Xaa = Any Amino Acid
CCEWACXNPACTGXA

SEQ ID NO: 14032 - protein, 16 aa, Artificial Sequence
  Synthetically generated peptide
  VARIANT (1)..(16): Xaa = Any Amino Acid
CCEWACXNPACTGXXA

SEQ ID NO: 14033 - protein, 17 aa, Artificial Sequence
  Synthetically generated peptide
  VARIANT (1)..(17): Xaa = Any Amino Acid
CCEWACXNPACTGXXXA

SEQ ID NO: 14034 - protein, 14 aa, Artificial Sequence
  Synthetically generated peptide
  VARIANT (1)..(14): Xaa = Any Amino Acid
CCEWACNXPACTGA

SEQ ID NO: 14035 - protein, 15 aa, Artificial Sequence
  Synthetically generated peptide
  VARIANT (1)..(15): Xaa = Any Amino Acid
CCEWACNXXPACTGA

SEQ ID NO: 14036 - protein, 16 aa, Artificial Sequence
  Synthetically generated peptide
  VARIANT (1)..(16): Xaa = Any Amino Acid
CCEWACNXXXPACTGA

SEQ ID NO: 14037 - protein, 17 aa, Artificial Sequence
  Synthetically generated peptide
  VARIANT (1)..(17): Xaa = Any Amino Acid
CCEWACNXXXXPACTGA

SEQ ID NO: 14038 - protein, 17 aa, Artificial Sequence
  Synthetically generated peptide
  VARIANT (1)..(17): Xaa = Any Amino Acid
CCEWACNXXXPXACTGA

SEQ ID NO: 14039 - protein, 17 aa, Artificial Sequence
  Synthetically generated peptide
  VARIANT (1)..(17): Xaa = Any Amino Acid
CCEWACNXXXPAXCTGA

SEQ ID NO: 14040 - protein, 17 aa, Artificial Sequence
  Synthetically generated peptide
  VARIANT (1)..(17): Xaa = Any Amino Acid
CCEWACNXXXPACXTGA

SEQ ID NO: 14041 - protein, 17 aa, Artificial Sequence
  Synthetically generated peptide
  VARIANT (1)..(17): Xaa = Any Amino Acid
CCEWACNXXXPACTXGA

SEQ ID NO: 14042 - protein, 17 aa, Artificial Sequence
  Synthetically generated peptide
  VARIANT (1)..(17): Xaa = Any Amino Acid
CCEWACNXXXPACTGXA

SEQ ID NO: 14043 - protein, 16 aa, Artificial Sequence
  Synthetically generated peptide
  VARIANT (1)..(16): Xaa = Any Amino Acid
CCEWACNXXPXACTGA

SEQ ID NO: 14044 - protein, 17 aa, Artificial Sequence
  Synthetically generated peptide
  VARIANT (1)..(17): Xaa = Any Amino Acid
CCEWACNXXPXXACTGA

SEQ ID NO: 14045 - protein, 17 aa, Artificial Sequence
  Synthetically generated peptide
  VARIANT (1)..(17): Xaa = Any Amino Acid
CCEWACNXXPXAXCTGA

SEQ ID NO: 14046 - protein, 17 aa, Artificial Sequence
  Synthetically generated peptide
  VARIANT (1)..(17): Xaa = Any Amino Acid
CCEWACNXXPXACXTGA

SEQ ID NO: 14047 - protein, 17 aa, Artificial Sequence
  Synthetically generated peptide
  VARIANT (1)..(17): Xaa = Any Amino Acid
CCEWACNXXPXACTXGA

SEQ ID NO: 14048 - protein, 17 aa, Artificial Sequence
  Synthetically generated peptide
  VARIANT (1)..(17): Xaa = Any Amino Acid
CCEWACNXXPXACTGXA

SEQ ID NO: 14049 - protein, 16 aa, Artificial Sequence
  Synthetically generated peptide
  VARIANT (1)..(16): Xaa = Any Amino Acid
CCEWACNXXPAXCTGA

SEQ ID NO: 14050 - protein, 17 aa, Artificial Sequence
  Synthetically generated peptide
  VARIANT (1)..(17): Xaa = Any Amino Acid
CCEWACNXXPAXXCTGA

SEQ ID NO: 14051 - protein, 17 aa, Artificial Sequence
  Synthetically generated peptide
  VARIANT (1)..(17): Xaa = Any Amino Acid
CCEWACNXXPAXCXTGA

SEQ ID NO: 14052 - protein, 17 aa, Artificial Sequence
  Synthetically generated peptide
  VARIANT (1)..(17): Xaa = Any Amino Acid
CCEWACNXXPAXCTXGA

SEQ ID NO: 14053 - protein, 17 aa, Artificial Sequence
  Synthetically generated peptide
  VARIANT (1)..(17): Xaa = Any Amino Acid
CCEWACNXXPAXCTGXA

SEQ ID NO: 14054 - protein, 16 aa, Artificial Sequence
  Synthetically generated peptide
  VARIANT (1)..(16): Xaa = Any Amino Acid
CCEWACNXXPACXTGA

SEQ ID NO: 14055 - protein, 17 aa, Artificial Sequence
  Synthetically generated peptide
  VARIANT (1)..(17): Xaa = Any Amino Acid
CCEWACNXXPACXXTGA

SEQ ID NO: 14056 - protein, 17 aa, Artificial Sequence
  Synthetically generated peptide
  VARIANT (1)..(17): Xaa = Any Amino Acid
CCEWACNXXPACXTXGA

SEQ ID NO: 14057 - protein, 17 aa, Artificial Sequence
  Synthetically generated peptide
  VARIANT (1)..(17): Xaa = Any Amino Acid
CCEWACNXXPACXTGXA

SEQ ID NO: 14058 - protein, 16 aa, Artificial Sequence
  Synthetically generated peptide
  VARIANT (1)..(16): Xaa = Any Amino Acid
CCEWACNXXPACTXGA

SEQ ID NO: 14059 - protein, 17 aa, Artificial Sequence
  Synthetically generated peptide
  VARIANT (1)..(17): Xaa = Any Amino Acid
CCEWACNXXPACTXXGA

SEQ ID NO: 14060 - protein, 17 aa, Artificial Sequence
  Synthetically generated peptide
  VARIANT (1)..(17): Xaa = Any Amino Acid
CCEWACNXXPACTXGXA

SEQ ID NO: 14061 - protein, 16 aa, Artificial Sequence
  Synthetically generated peptide
  VARIANT (1)..(16): Xaa = Any Amino Acid
CCEWACNXXPACTGXA

SEQ ID NO: 14062 - protein, 17 aa, Artificial Sequence
  Synthetically generated peptide
  VARIANT (1)..(17): Xaa = Any Amino Acid
CCEWACNXXPACTGXXA

SEQ ID NO: 14063 - protein, 15 aa, Artificial Sequence
  Synthetically generated peptide
  VARIANT (1)..(15): Xaa = Any Amino Acid
CCEWACNXPXACTGA

SEQ ID NO: 14064 - protein, 16 aa, Artificial Sequence
  Synthetically generated peptide
  VARIANT (1)..(16): Xaa = Any Amino Acid
CCEWACNXPXXACTGA

SEQ ID NO: 14065 - protein, 17 aa, Artificial Sequence
  Synthetically generated peptide
  VARIANT (1)..(17): Xaa = Any Amino Acid
CCEWACNXPXXXACTGA

SEQ ID NO: 14066 - protein, 17 aa, Artificial Sequence
  Synthetically generated peptide
  VARIANT (1)..(17): Xaa = Any Amino Acid
CCEWACNXPXXAXCTGA

SEQ ID NO: 14067 - protein, 17 aa, Artificial Sequence
  Synthetically generated peptide
  VARIANT (1)..(17): Xaa = Any Amino Acid
CCEWACNXPXXACXTGA

SEQ ID NO: 14068 - protein, 17 aa, Artificial Sequence
  Synthetically generated peptide
  VARIANT (1)..(17): Xaa = Any Amino Acid
CCEWACNXPXXACTXGA

SEQ ID NO: 14069 - protein, 17 aa, Artificial Sequence
  Synthetically generated peptide
  VARIANT (1)..(17): Xaa = Any Amino Acid
CCEWACNXPXXACTGXA

SEQ ID NO: 14070 - protein, 16 aa, Artificial Sequence
  Synthetically generated peptide
  VARIANT (1)..(16): Xaa = Any Amino Acid
CCEWACNXPXAXCTGA

SEQ ID NO: 14071 - protein, 17 aa, Artificial Sequence
  Synthetically generated peptide
  VARIANT (1)..(17): Xaa = Any Amino Acid
CCEWACNXPXAXXCTGA

SEQ ID NO: 14072 - protein, 17 aa, Artificial Sequence
  Synthetically generated peptide
  VARIANT (1)..(17): Xaa = Any Amino Acid
CCEWACNXPXAXCXTGA

SEQ ID NO: 14073 - protein, 17 aa, Artificial Sequence
  Synthetically generated peptide
  VARIANT (1)..(17): Xaa = Any Amino Acid
CCEWACNXPXAXCTXGA

SEQ ID NO: 14074 - protein, 17 aa, Artificial Sequence
  Synthetically generated peptide
  VARIANT (1)..(17): Xaa = Any Amino Acid
CCEWACNXPXAXCTGXA

SEQ ID NO: 14075 - protein, 16 aa, Artificial Sequence
  Synthetically generated peptide
  VARIANT (1)..(16): Xaa = Any Amino Acid
CCEWACNXPXACXTGA

SEQ ID NO: 14076 - protein, 17 aa, Artificial Sequence
  Synthetically generated peptide
  VARIANT (1)..(17): Xaa = Any Amino Acid
CCEWACNXPXACXXTGA

SEQ ID NO: 14077 - protein, 17 aa, Artificial Sequence
  Synthetically generated peptide
  VARIANT (1)..(17): Xaa = Any Amino Acid
CCEWACNXPXACXTXGA

SEQ ID NO: 14078 - protein, 17 aa, Artificial Sequence
  Synthetically generated peptide
  VARIANT (1)..(17): Xaa = Any Amino Acid
CCEWACNXPXACXTGXA

SEQ ID NO: 14079 - protein, 16 aa, Artificial Sequence
  Synthetically generated peptide
  VARIANT (1)..(16): Xaa = Any Amino Acid
CCEWACNXPXACTXGA

SEQ ID NO: 14080 - protein, 17 aa, Artificial Sequence
  Synthetically generated peptide
  VARIANT (1)..(17): Xaa = Any Amino Acid
CCEWACNXPXACTXXGA

SEQ ID NO: 14081 - protein, 17 aa, Artificial Sequence
  Synthetically generated peptide
  VARIANT (1)..(17): Xaa = Any Amino Acid
CCEWACNXPXACTXGXA

SEQ ID NO: 14082 - protein, 16 aa, Artificial Sequence
  Synthetically generated peptide
  VARIANT (1)..(16): Xaa = Any Amino Acid
CCEWACNXPXACTGXA

SEQ ID NO: 14083 - protein, 17 aa, Artificial Sequence
  Synthetically generated peptide
  VARIANT (1)..(17): Xaa = Any Amino Acid
CCEWACNXPXACTGXXA

SEQ ID NO: 14084 - protein, 15 aa, Artificial Sequence
  Synthetically generated peptide
  VARIANT (1)..(15): Xaa = Any Amino Acid
CCEWACNXPAXCTGA

SEQ ID NO: 14085 - protein, 16 aa, Artificial Sequence
  Synthetically generated peptide
  VARIANT (1)..(16): Xaa = Any Amino Acid
CCEWACNXPAXXCTGA

SEQ ID NO: 14086 - protein, 17 aa, Artificial Sequence
  Synthetically generated peptide
  VARIANT (1)..(17): Xaa = Any Amino Acid
CCEWACNXPAXXXCTGA

SEQ ID NO: 14087 - protein, 17 aa, Artificial Sequence
  Synthetically generated peptide
  VARIANT (1)..(17): Xaa = Any Amino Acid
CCEWACNXPAXXCXTGA

SEQ ID NO: 14088 - protein, 17 aa, Artificial Sequence
  Synthetically generated peptide
  VARIANT (1)..(17): Xaa = Any Amino Acid
CCEWACNXPAXXCTXGA

SEQ ID NO: 14089 - protein, 17 aa, Artificial Sequence
  Synthetically generated peptide
  VARIANT (1)..(17): Xaa = Any Amino Acid
CCEWACNXPAXXCTGXA

SEQ ID NO: 14090 - protein, 16 aa, Artificial Sequence
  Synthetically generated peptide
  VARIANT (1)..(16): Xaa = Any Amino Acid
CCEWACNXPAXCXTGA

SEQ ID NO: 14091 - protein, 17 aa, Artificial Sequence
  Synthetically generated peptide
  VARIANT (1)..(17): Xaa = Any Amino Acid
CCEWACNXPAXCXXTGA

SEQ ID NO: 14092 - protein, 17 aa, Artificial Sequence
  Synthetically generated peptide
  VARIANT (1)..(17): Xaa = Any Amino Acid
CCEWACNXPAXCXTXGA

SEQ ID NO: 14093 - protein, 17 aa, Artificial Sequence
  Synthetically generated peptide
  VARIANT (1)..(17): Xaa = Any Amino Acid
CCEWACNXPAXCXTGXA

SEQ ID NO: 14094 - protein, 16 aa, Artificial Sequence
  Synthetically generated peptide
  VARIANT (1)..(16): Xaa = Any Amino Acid
CCEWACNXPAXCTXGA

SEQ ID NO: 14095 - protein, 17 aa, Artificial Sequence
  Synthetically generated peptide
  VARIANT (1)..(17): Xaa = Any Amino Acid
CCEWACNXPAXCTXXGA

SEQ ID NO: 14096 - protein, 17 aa, Artificial Sequence
  Synthetically generated peptide
  VARIANT (1)..(17): Xaa = Any Amino Acid
CCEWACNXPAXCTXGXA

SEQ ID NO: 14097 - protein, 16 aa, Artificial Sequence
  Synthetically generated peptide
  VARIANT (1)..(16): Xaa = Any Amino Acid
CCEWACNXPAXCTGXA

SEQ ID NO: 14098 - protein, 17 aa, Artificial Sequence
  Synthetically generated peptide
  VARIANT (1)..(17): Xaa = Any Amino Acid
CCEWACNXPAXCTGXXA

SEQ ID NO: 14099 - protein, 15 aa, Artificial Sequence
  Synthetically generated peptide
  VARIANT (1)..(15): Xaa = Any Amino Acid
CCEWACNXPACXTGA

SEQ ID NO: 14100 - protein, 16 aa, Artificial Sequence
  Synthetically generated peptide
  VARIANT (1)..(16): Xaa = Any Amino Acid
CCEWACNXPACXXTGA

SEQ ID NO: 14101 - protein, 17 aa, Artificial Sequence
  Synthetically generated peptide
  VARIANT (1)..(17): Xaa = Any Amino Acid
CCEWACNXPACXXXTGA

SEQ ID NO: 14102 - protein, 17 aa, Artificial Sequence
  Synthetically generated peptide
  VARIANT (1)..(17): Xaa = Any Amino Acid
CCEWACNXPACXXTXGA

SEQ ID NO: 14103 - protein, 17 aa, Artificial Sequence
  Synthetically generated peptide
  VARIANT (1)..(17): Xaa = Any Amino Acid
CCEWACNXPACXXTGXA

SEQ ID NO: 14104 - protein, 16 aa, Artificial Sequence
  Synthetically generated peptide
  VARIANT (1)..(16): Xaa = Any Amino Acid
CCEWACNXPACXTXGA

SEQ ID NO: 14105 - protein, 17 aa, Artificial Sequence
  Synthetically generated peptide
  VARIANT (1)..(17): Xaa = Any Amino Acid
CCEWACNXPACXTXXGA

SEQ ID NO: 14106 - protein, 17 aa, Artificial Sequence
  Synthetically generated peptide
  VARIANT (1)..(17): Xaa = Any Amino Acid
CCEWACNXPACXTXGXA

SEQ ID NO: 14107 - protein, 16 aa, Artificial Sequence
  Synthetically generated peptide
  VARIANT (1)..(16): Xaa = Any Amino Acid
CCEWACNXPACXTGXA

SEQ ID NO: 14108 - protein, 17 aa, Artificial Sequence
  Synthetically generated peptide
  VARIANT (1)..(17): Xaa = Any Amino Acid
CCEWACNXPACXTGXXA

SEQ ID NO: 14109 - protein, 15 aa, Artificial Sequence
  Synthetically generated peptide
  VARIANT (1)..(15): Xaa = Any Amino Acid
CCEWACNXPACTXGA

SEQ ID NO: 14110 - protein, 16 aa, Artificial Sequence
  Synthetically generated peptide
  VARIANT (1)..(16): Xaa = Any Amino Acid
CCEWACNXPACTXXGA

SEQ ID NO: 14111 - protein, 17 aa, Artificial Sequence
  Synthetically generated peptide
  VARIANT (1)..(17): Xaa = Any Amino Acid
CCEWACNXPACTXXXGA

SEQ ID NO: 14112 - protein, 17 aa, Artificial Sequence
  Synthetically generated peptide
  VARIANT (1)..(17): Xaa = Any Amino Acid
CCEWACNXPACTXXGXA

SEQ ID NO: 14113 - protein, 16 aa, Artificial Sequence
  Synthetically generated peptide
  VARIANT (1)..(16): Xaa = Any Amino Acid
CCEWACNXPACTXGXA

SEQ ID NO: 14114 - protein, 17 aa, Artificial Sequence
  Synthetically generated peptide
  VARIANT (1)..(17): Xaa = Any Amino Acid
CCEWACNXPACTXGXXA

SEQ ID NO: 14115 - protein, 15 aa, Artificial Sequence
  Synthetically generated peptide
  VARIANT (1)..(15): Xaa = Any Amino Acid
CCEWACNXPACTGXA

SEQ ID NO: 14116 - protein, 16 aa, Artificial Sequence
  Synthetically generated peptide
  VARIANT (1)..(16): Xaa = Any Amino Acid
CCEWACNXPACTGXXA

SEQ ID NO: 14117 - protein, 17 aa, Artificial Sequence
  Synthetically generated peptide
  VARIANT (1)..(17): Xaa = Any Amino Acid
CCEWACNXPACTGXXXA

SEQ ID NO: 14118 - protein, 14 aa, Artificial Sequence
  Synthetically generated peptide
  VARIANT (1)..(14): Xaa = Any Amino Acid
CCEWACNPXACTGA

SEQ ID NO: 14119 - protein, 15 aa, Artificial Sequence
  Synthetically generated peptide
  VARIANT (1)..(15): Xaa = Any Amino Acid
CCEWACNPXXACTGA

SEQ ID NO: 14120 - protein, 16 aa, Artificial Sequence
  Synthetically generated peptide
  VARIANT (1)..(16): Xaa = Any Amino Acid
CCEWACNPXXXACTGA

SEQ ID NO: 14121 - protein, 17 aa, Artificial Sequence
  Synthetically generated peptide
  VARIANT (1)..(17): Xaa = Any Amino Acid
CCEWACNPXXXXACTGA

SEQ ID NO: 14122 - protein, 17 aa, Artificial Sequence
  Synthetically generated peptide
  VARIANT (1)..(17): Xaa = Any Amino Acid
CCEWACNPXXXAXCTGA

SEQ ID NO: 14123 - protein, 17 aa, Artificial Sequence
  Synthetically generated peptide
  VARIANT (1)..(17): Xaa = Any Amino Acid
CCEWACNPXXXACXTGA

SEQ ID NO: 14124 - protein, 17 aa, Artificial Sequence
  Synthetically generated peptide
  VARIANT (1)..(17): Xaa = Any Amino Acid
CCEWACNPXXXACTXGA

SEQ ID NO: 14125 - protein, 17 aa, Artificial Sequence
  Synthetically generated peptide
  VARIANT (1)..(17): Xaa = Any Amino Acid
CCEWACNPXXXACTGXA

SEQ ID NO: 14126 - protein, 16 aa, Artificial Sequence
  Synthetically generated peptide
  VARIANT (1)..(16): Xaa = Any Amino Acid
CCEWACNPXXAXCTGA

SEQ ID NO: 14127 - protein, 17 aa, Artificial Sequence
  Synthetically generated peptide
  VARIANT (1)..(17): Xaa = Any Amino Acid
CCEWACNPXXAXXCTGA

SEQ ID NO: 14128 - protein, 17 aa, Artificial Sequence
  Synthetically generated peptide
  VARIANT (1)..(17): Xaa = Any Amino Acid
CCEWACNPXXAXCXTGA

SEQ ID NO: 14129 - protein, 17 aa, Artificial Sequence
  Synthetically generated peptide
  VARIANT (1)..(17): Xaa = Any Amino Acid
CCEWACNPXXAXCTXGA

SEQ ID NO: 14130 - protein, 17 aa, Artificial Sequence
  Synthetically generated peptide
  VARIANT (1)..(17): Xaa = Any Amino Acid
CCEWACNPXXAXCTGXA

SEQ ID NO: 14131 - protein, 16 aa, Artificial Sequence
  Synthetically generated peptide
  VARIANT (1)..(16): Xaa = Any Amino Acid
CCEWACNPXXACXTGA

SEQ ID NO: 14132 - protein, 17 aa, Artificial Sequence
  Synthetically generated peptide
  VARIANT (1)..(17): Xaa = Any Amino Acid
CCEWACNPXXACXXTGA

SEQ ID NO: 14133 - protein, 17 aa, Artificial Sequence
  Synthetically generated peptide
  VARIANT (1)..(17): Xaa = Any Amino Acid
CCEWACNPXXACXTXGA

SEQ ID NO: 14134 - protein, 17 aa, Artificial Sequence
  Synthetically generated peptide
  VARIANT (1)..(17): Xaa = Any Amino Acid
CCEWACNPXXACXTGXA

SEQ ID NO: 14135 - protein, 16 aa, Artificial Sequence
  Synthetically generated peptide
  VARIANT (1)..(16): Xaa = Any Amino Acid
CCEWACNPXXACTXGA

SEQ ID NO: 14136 - protein, 17 aa, Artificial Sequence
  Synthetically generated peptide
  VARIANT (1)..(17): Xaa = Any Amino Acid
CCEWACNPXXACTXXGA

SEQ ID NO: 14137 - protein, 17 aa, Artificial Sequence
  Synthetically generated peptide
  VARIANT (1)..(17): Xaa = Any Amino Acid
CCEWACNPXXACTXGXA

SEQ ID NO: 14138 - protein, 16 aa, Artificial Sequence
  Synthetically generated peptide
  VARIANT (1)..(16): Xaa = Any Amino Acid
CCEWACNPXXACTGXA

SEQ ID NO: 14139 - protein, 17 aa, Artificial Sequence
  Synthetically generated peptide
  VARIANT (1)..(17): Xaa = Any Amino Acid
CCEWACNPXXACTGXXA

SEQ ID NO: 14140 - protein, 15 aa, Artificial Sequence
  Synthetically generated peptide
  VARIANT (1)..(15): Xaa = Any Amino Acid
CCEWACNPXAXCTGA

SEQ ID NO: 14141 - protein, 16 aa, Artificial Sequence
  Synthetically generated peptide
  VARIANT (1)..(16): Xaa = Any Amino Acid
CCEWACNPXAXXCTGA

SEQ ID NO: 14142 - protein, 17 aa, Artificial Sequence
  Synthetically generated peptide
  VARIANT (1)..(17): Xaa = Any Amino Acid
CCEWACNPXAXXXCTGA

SEQ ID NO: 14143 - protein, 17 aa, Artificial Sequence
  Synthetically generated peptide
  VARIANT (1)..(17): Xaa = Any Amino Acid
CCEWACNPXAXXCXTGA

SEQ ID NO: 14144 - protein, 17 aa, Artificial Sequence
  Synthetically generated peptide
  VARIANT (1)..(17): Xaa = Any Amino Acid
CCEWACNPXAXXCTXGA

SEQ ID NO: 14145 - protein, 17 aa, Artificial Sequence
  Synthetically generated peptide
  VARIANT (1)..(17): Xaa = Any Amino Acid
CCEWACNPXAXXCTGXA

SEQ ID NO: 14146 - protein, 16 aa, Artificial Sequence
  Synthetically generated peptide
  VARIANT (1)..(16): Xaa = Any Amino Acid
CCEWACNPXAXCXTGA

SEQ ID NO: 14147 - protein, 17 aa, Artificial Sequence
  Synthetically generated peptide
  VARIANT (1)..(17): Xaa = Any Amino Acid
CCEWACNPXAXCXXTGA

SEQ ID NO: 14148 - protein, 17 aa, Artificial Sequence
  Synthetically generated peptide
  VARIANT (1)..(17): Xaa = Any Amino Acid
CCEWACNPXAXCXTXGA

SEQ ID NO: 14149 - protein, 17 aa, Artificial Sequence
  Synthetically generated peptide
  VARIANT (1)..(17): Xaa = Any Amino Acid
CCEWACNPXAXCXTGXA

SEQ ID NO: 14150 - protein, 16 aa, Artificial Sequence
  Synthetically generated peptide
  VARIANT (1)..(16): Xaa = Any Amino Acid
CCEWACNPXAXCTXGA

SEQ ID NO: 14151 - protein, 17 aa, Artificial Sequence
  Synthetically generated peptide
  VARIANT (1)..(17): Xaa = Any Amino Acid
CCEWACNPXAXCTXXGA

SEQ ID NO: 14152 - protein, 17 aa, Artificial Sequence
  Synthetically generated peptide
  VARIANT (1)..(17): Xaa = Any Amino Acid
CCEWACNPXAXCTXGXA

SEQ ID NO: 14153 - protein, 16 aa, Artificial Sequence
  Synthetically generated peptide
  VARIANT (1)..(16): Xaa = Any Amino Acid
CCEWACNPXAXCTGXA

SEQ ID NO: 14154 - protein, 17 aa, Artificial Sequence
  Synthetically generated peptide
  VARIANT (1)..(17): Xaa = Any Amino Acid
CCEWACNPXAXCTGXXA

SEQ ID NO: 14155 - protein, 15 aa, Artificial Sequence
  Synthetically generated peptide
  VARIANT (1)..(15): Xaa = Any Amino Acid
CCEWACNPXACXTGA

SEQ ID NO: 14156 - protein, 16 aa, Artificial Sequence
  Synthetically generated peptide
  VARIANT (1)..(16): Xaa = Any Amino Acid
CCEWACNPXACXXTGA

SEQ ID NO: 14157 - protein, 17 aa, Artificial Sequence
  Synthetically generated peptide
  VARIANT (1)..(17): Xaa = Any Amino Acid
CCEWACNPXACXXXTGA

SEQ ID NO: 14158 - protein, 17 aa, Artificial Sequence
  Synthetically generated peptide
  VARIANT (1)..(17): Xaa = Any Amino Acid
CCEWACNPXACXXTXGA

SEQ ID NO: 14159 - protein, 17 aa, Artificial Sequence
  Synthetically generated peptide
  VARIANT (1)..(17): Xaa = Any Amino Acid
CCEWACNPXACXXTGXA

SEQ ID NO: 14160 - protein, 16 aa, Artificial Sequence
  Synthetically generated peptide
  VARIANT (1)..(16): Xaa = Any Amino Acid
CCEWACNPXACXTXGA

SEQ ID NO: 14161 - protein, 17 aa, Artificial Sequence
  Synthetically generated peptide
  VARIANT (1)..(17): Xaa = Any Amino Acid
CCEWACNPXACXTXXGA

SEQ ID NO: 14162 - protein, 17 aa, Artificial Sequence
  Synthetically generated peptide
  VARIANT (1)..(17): Xaa = Any Amino Acid
CCEWACNPXACXTXGXA

SEQ ID NO: 14163 - protein, 16 aa, Artificial Sequence
  Synthetically generated peptide
  VARIANT (1)..(16): Xaa = Any Amino Acid
CCEWACNPXACXTGXA

SEQ ID NO: 14164 - protein, 17 aa, Artificial Sequence
  Synthetically generated peptide
  VARIANT (1)..(17): Xaa = Any Amino Acid
CCEWACNPXACXTGXXA

SEQ ID NO: 14165 - protein, 15 aa, Artificial Sequence
  Synthetically generated peptide
  VARIANT (1)..(15): Xaa = Any Amino Acid
CCEWACNPXACTXGA

SEQ ID NO: 14166 - protein, 16 aa, Artificial Sequence
  Synthetically generated peptide
  VARIANT (1)..(16): Xaa = Any Amino Acid
CCEWACNPXACTXXGA

SEQ ID NO: 14167 - protein, 17 aa, Artificial Sequence
  Synthetically generated peptide
  VARIANT (1)..(17): Xaa = Any Amino Acid
CCEWACNPXACTXXXGA

SEQ ID NO: 14168 - protein, 17 aa, Artificial Sequence
  Synthetically generated peptide
  VARIANT (1)..(17): Xaa = Any Amino Acid
CCEWACNPXACTXXGXA

SEQ ID NO: 14169 - protein, 16 aa, Artificial Sequence
  Synthetically generated peptide
  VARIANT (1)..(16): Xaa = Any Amino Acid
CCEWACNPXACTXGXA

SEQ ID NO: 14170 - protein, 17 aa, Artificial Sequence
  Synthetically generated peptide
  VARIANT (1)..(17): Xaa = Any Amino Acid
CCEWACNPXACTXGXXA

SEQ ID NO: 14171 - protein, 15 aa, Artificial Sequence
  Synthetically generated peptide
  VARIANT (1)..(15): Xaa = Any Amino Acid
CCEWACNPXACTGXA

SEQ ID NO: 14172 - protein, 16 aa, Artificial Sequence
  Synthetically generated peptide
  VARIANT (1)..(16): Xaa = Any Amino Acid
CCEWACNPXACTGXXA

SEQ ID NO: 14173 - protein, 17 aa, Artificial Sequence
  Synthetically generated peptide
  VARIANT (1)..(17): Xaa = Any Amino Acid
CCEWACNPXACTGXXXA

SEQ ID NO: 14174 - protein, 14 aa, Artificial Sequence
  Synthetically generated peptide
  VARIANT (1)..(14): Xaa = Any Amino Acid
CCEWACNPAXCTGA

SEQ ID NO: 14175 - protein, 15 aa, Artificial Sequence
  Synthetically generated peptide
  VARIANT (1)..(15): Xaa = Any Amino Acid
CCEWACNPAXXCTGA

SEQ ID NO: 14176 - protein, 16 aa, Artificial Sequence
  Synthetically generated peptide
  VARIANT (1)..(16): Xaa = Any Amino Acid
CCEWACNPAXXXCTGA

SEQ ID NO: 14177 - protein, 17 aa, Artificial Sequence
  Synthetically generated peptide
  VARIANT (1)..(17): Xaa = Any Amino Acid
CCEWACNPAXXXXCTGA

SEQ ID NO: 14178 - protein, 17 aa, Artificial Sequence
  Synthetically generated peptide
  VARIANT (1)..(17): Xaa = Any Amino Acid
CCEWACNPAXXXCXTGA

SEQ ID NO: 14179 - protein, 17 aa, Artificial Sequence
  Synthetically generated peptide
  VARIANT (1)..(17): Xaa = Any Amino Acid
CCEWACNPAXXXCTXGA

SEQ ID NO: 14180 - protein, 17 aa, Artificial Sequence
  Synthetically generated peptide
  VARIANT (1)..(17): Xaa = Any Amino Acid
CCEWACNPAXXXCTGXA

SEQ ID NO: 14181 - protein, 16 aa, Artificial Sequence
  Synthetically generated peptide
  VARIANT (1)..(16): Xaa = Any Amino Acid
CCEWACNPAXXCXTGA

SEQ ID NO: 14182 - protein, 17 aa, Artificial Sequence
  Synthetically generated peptide
  VARIANT (1)..(17): Xaa = Any Amino Acid
CCEWACNPAXXCXXTGA

SEQ ID NO: 14183 - protein, 17 aa, Artificial Sequence
  Synthetically generated peptide
  VARIANT (1)..(17): Xaa = Any Amino Acid
CCEWACNPAXXCXTXGA

SEQ ID NO: 14184 - protein, 17 aa, Artificial Sequence
  Synthetically generated peptide
  VARIANT (1)..(17): Xaa = Any Amino Acid
CCEWACNPAXXCXTGXA

SEQ ID NO: 14185 - protein, 16 aa, Artificial Sequence
  Synthetically generated peptide
  VARIANT (1)..(16): Xaa = Any Amino Acid
CCEWACNPAXXCTXGA

SEQ ID NO: 14186 - protein, 17 aa, Artificial Sequence
  Synthetically generated peptide
  VARIANT (1)..(17): Xaa = Any Amino Acid
CCEWACNPAXXCTXXGA

SEQ ID NO: 14187 - protein, 17 aa, Artificial Sequence
  Synthetically generated peptide
  VARIANT (1)..(17): Xaa = Any Amino Acid
CCEWACNPAXXCTXGXA

SEQ ID NO: 14188 - protein, 16 aa, Artificial Sequence
  Synthetically generated peptide
  VARIANT (1)..(16): Xaa = Any Amino Acid
CCEWACNPAXXCTGXA

SEQ ID NO: 14189 - protein, 17 aa, Artificial Sequence
  Synthetically generated peptide
  VARIANT (1)..(17): Xaa = Any Amino Acid
CCEWACNPAXXCTGXXA

SEQ ID NO: 14190 - protein, 15 aa, Artificial Sequence
  Synthetically generated peptide
  VARIANT (1)..(15): Xaa = Any Amino Acid
CCEWACNPAXCXTGA

SEQ ID NO: 14191 - protein, 16 aa, Artificial Sequence
  Synthetically generated peptide
  VARIANT (1)..(16): Xaa = Any Amino Acid
CCEWACNPAXCXXTGA

SEQ ID NO: 14192 - protein, 17 aa, Artificial Sequence
  Synthetically generated peptide
  VARIANT (1)..(17): Xaa = Any Amino Acid
CCEWACNPAXCXXXTGA

SEQ ID NO: 14193 - protein, 17 aa, Artificial Sequence
  Synthetically generated peptide
  VARIANT (1)..(17): Xaa = Any Amino Acid
CCEWACNPAXCXXTXGA

SEQ ID NO: 14194 - protein, 17 aa, Artificial Sequence
  Synthetically generated peptide
  VARIANT (1)..(17): Xaa = Any Amino Acid
CCEWACNPAXCXXTGXA

SEQ ID NO: 14195 - protein, 16 aa, Artificial Sequence
  Synthetically generated peptide
  VARIANT (1)..(16): Xaa = Any Amino Acid
CCEWACNPAXCXTXGA

SEQ ID NO: 14196 - protein, 17 aa, Artificial Sequence
  Synthetically generated peptide
  VARIANT (1)..(17): Xaa = Any Amino Acid
CCEWACNPAXCXTXXGA

SEQ ID NO: 14197 - protein, 17 aa, Artificial Sequence
  Synthetically generated peptide
  VARIANT (1)..(17): Xaa = Any Amino Acid
CCEWACNPAXCXTXGXA

SEQ ID NO: 14198 - protein, 16 aa, Artificial Sequence
  Synthetically generated peptide
  VARIANT (1)..(16): Xaa = Any Amino Acid
CCEWACNPAXCXTGXA

SEQ ID NO: 14199 - protein, 17 aa, Artificial Sequence
  Synthetically generated peptide
  VARIANT (1)..(17): Xaa = Any Amino Acid
CCEWACNPAXCXTGXXA

SEQ ID NO: 14200 - protein, 15 aa, Artificial Sequence
  Synthetically generated peptide
  VARIANT (1)..(15): Xaa = Any Amino Acid
CCEWACNPAXCTXGA

SEQ ID NO: 14201 - protein, 16 aa, Artificial Sequence
  Synthetically generated peptide
  VARIANT (1)..(16): Xaa = Any Amino Acid
CCEWACNPAXCTXXGA

SEQ ID NO: 14202 - protein, 17 aa, Artificial Sequence
  Synthetically generated peptide
  VARIANT (1)..(17): Xaa = Any Amino Acid
CCEWACNPAXCTXXXGA

SEQ ID NO: 14203 - protein, 17 aa, Artificial Sequence
  Synthetically generated peptide
  VARIANT (1)..(17): Xaa = Any Amino Acid
CCEWACNPAXCTXXGXA

SEQ ID NO: 14204 - protein, 16 aa, Artificial Sequence
  Synthetically generated peptide
  VARIANT (1)..(16): Xaa = Any Amino Acid
CCEWACNPAXCTXGXA

SEQ ID NO: 14205 - protein, 17 aa, Artificial Sequence
  Synthetically generated peptide
  VARIANT (1)..(17): Xaa = Any Amino Acid
CCEWACNPAXCTXGXXA

SEQ ID NO: 14206 - protein, 15 aa, Artificial Sequence
  Synthetically generated peptide
  VARIANT (1)..(15): Xaa = Any Amino Acid
CCEWACNPAXCTGXA

SEQ ID NO: 14207 - protein, 16 aa, Artificial Sequence
  Synthetically generated peptide
  VARIANT (1)..(16): Xaa = Any Amino Acid
CCEWACNPAXCTGXXA

SEQ ID NO: 14208 - protein, 17 aa, Artificial Sequence
  Synthetically generated peptide
  VARIANT (1)..(17): Xaa = Any Amino Acid
CCEWACNPAXCTGXXXA

SEQ ID NO: 14209 - protein, 14 aa, Artificial Sequence
  Synthetically generated peptide
  VARIANT (1)..(14): Xaa = Any Amino Acid
CCEWACNPACXTGA

SEQ ID NO: 14210 - protein, 15 aa, Artificial Sequence
  Synthetically generated peptide
  VARIANT (1)..(15): Xaa = Any Amino Acid
CCEWACNPACXXTGA

SEQ ID NO: 14211 - protein, 16 aa, Artificial Sequence
  Synthetically generated peptide
  VARIANT (1)..(16): Xaa = Any Amino Acid
CCEWACNPACXXXTGA

SEQ ID NO: 14212 - protein, 17 aa, Artificial Sequence
  Synthetically generated peptide
  VARIANT (1)..(17): Xaa = Any Amino Acid
CCEWACNPACXXXXTGA

SEQ ID NO: 14213 - protein, 17 aa, Artificial Sequence
  Synthetically generated peptide
  VARIANT (1)..(17): Xaa = Any Amino Acid
CCEWACNPACXXXTXGA

SEQ ID NO: 14214 - protein, 17 aa, Artificial Sequence
  Synthetically generated peptide
  VARIANT (1)..(17): Xaa = Any Amino Acid
CCEWACNPACXXXTGXA

SEQ ID NO: 14215 - protein, 16 aa, Artificial Sequence
  Synthetically generated peptide
  VARIANT (1)..(16): Xaa = Any Amino Acid
CCEWACNPACXXTXGA

SEQ ID NO: 14216 - protein, 17 aa, Artificial Sequence
  Synthetically generated peptide
  VARIANT (1)..(17): Xaa = Any Amino Acid
CCEWACNPACXXTXXGA

SEQ ID NO: 14217 - protein, 17 aa, Artificial Sequence
  Synthetically generated peptide
  VARIANT (1)..(17): Xaa = Any Amino Acid
CCEWACNPACXXTXGXA

SEQ ID NO: 14218 - protein, 16 aa, Artificial Sequence
  Synthetically generated peptide
  VARIANT (1)..(16): Xaa = Any Amino Acid
CCEWACNPACXXTGXA

SEQ ID NO: 14219 - protein, 17 aa, Artificial Sequence
  Synthetically generated peptide
  VARIANT (1)..(17): Xaa = Any Amino Acid
CCEWACNPACXXTGXXA

SEQ ID NO: 14220 - protein, 15 aa, Artificial Sequence
  Synthetically generated peptide
  VARIANT (1)..(15): Xaa = Any Amino Acid
CCEWACNPACXTXGA

SEQ ID NO: 14221 - protein, 16 aa, Artificial Sequence
  Synthetically generated peptide
  VARIANT (1)..(16): Xaa = Any Amino Acid
CCEWACNPACXTXXGA

SEQ ID NO: 14222 - protein, 17 aa, Artificial Sequence
  Synthetically generated peptide
  VARIANT (1)..(17): Xaa = Any Amino Acid
CCEWACNPACXTXXXGA

SEQ ID NO: 14223 - protein, 17 aa, Artificial Sequence
  Synthetically generated peptide
  VARIANT (1)..(17): Xaa = Any Amino Acid
CCEWACNPACXTXXGXA

SEQ ID NO: 14224 - protein, 16 aa, Artificial Sequence
  Synthetically generated peptide
  VARIANT (1)..(16): Xaa = Any Amino Acid
CCEWACNPACXTXGXA

SEQ ID NO: 14225 - protein, 17 aa, Artificial Sequence
  Synthetically generated peptide
  VARIANT (1)..(17): Xaa = Any Amino Acid
CCEWACNPACXTXGXXA

SEQ ID NO: 14226 - protein, 15 aa, Artificial Sequence
  Synthetically generated peptide
  VARIANT (1)..(15): Xaa = Any Amino Acid
CCEWACNPACXTGXA

SEQ ID NO: 14227 - protein, 16 aa, Artificial Sequence
  Synthetically generated peptide
  VARIANT (1)..(16): Xaa = Any Amino Acid
CCEWACNPACXTGXXA

SEQ ID NO: 14228 - protein, 17 aa, Artificial Sequence
  Synthetically generated peptide
  VARIANT (1)..(17): Xaa = Any Amino Acid
CCEWACNPACXTGXXXA

SEQ ID NO: 14229 - protein, 14 aa, Artificial Sequence
  Synthetically generated peptide
  VARIANT (1)..(14): Xaa = Any Amino Acid
CCEWACNPACTXGA

SEQ ID NO: 14230 - protein, 15 aa, Artificial Sequence
  Synthetically generated peptide
  VARIANT (1)..(15): Xaa = Any Amino Acid
CCEWACNPACTXXGA

SEQ ID NO: 14231 - protein, 16 aa, Artificial Sequence
  Synthetically generated peptide
  VARIANT (1)..(16): Xaa = Any Amino Acid
CCEWACNPACTXXXGA

SEQ ID NO: 14232 - protein, 17 aa, Artificial Sequence
  Synthetically generated peptide
  VARIANT (1)..(17): Xaa = Any Amino Acid
CCEWACNPACTXXXXGA

SEQ ID NO: 14233 - protein, 17 aa, Artificial Sequence
  Synthetically generated peptide
  VARIANT (1)..(17): Xaa = Any Amino Acid
CCEWACNPACTXXXGXA

SEQ ID NO: 14234 - protein, 16 aa, Artificial Sequence
  Synthetically generated peptide
  VARIANT (1)..(16): Xaa = Any Amino Acid
CCEWACNPACTXXGXA

SEQ ID NO: 14235 - protein, 17 aa, Artificial Sequence
  Synthetically generated peptide
  VARIANT (1)..(17): Xaa = Any Amino Acid
CCEWACNPACTXXGXXA

SEQ ID NO: 14236 - protein, 15 aa, Artificial Sequence
  Synthetically generated peptide
  VARIANT (1)..(15): Xaa = Any Amino Acid
CCEWACNPACTXGXA

SEQ ID NO: 14237 - protein, 16 aa, Artificial Sequence
  Synthetically generated peptide
  VARIANT (1)..(16): Xaa = Any Amino Acid
CCEWACNPACTXGXXA

SEQ ID NO: 14238 - protein, 17 aa, Artificial Sequence
  Synthetically generated peptide
  VARIANT (1)..(17): Xaa = Any Amino Acid
CCEWACNPACTXGXXXA

SEQ ID NO: 14239 - protein, 14 aa, Artificial Sequence
  Synthetically generated peptide
  VARIANT (1)..(14): Xaa = Any Amino Acid
CCEWACNPACTGXA

SEQ ID NO: 14240 - protein, 15 aa, Artificial Sequence
  Synthetically generated peptide
  VARIANT (1)..(15): Xaa = Any Amino Acid
CCEWACNPACTGXXA

SEQ ID NO: 14241 - protein, 16 aa, Artificial Sequence
  Synthetically generated peptide
  VARIANT (1)..(16): Xaa = Any Amino Acid
CCEWACNPACTGXXXA

SEQ ID NO: 14242 - protein, 17 aa, Artificial Sequence
  Synthetically generated peptide
  VARIANT (1)..(17): Xaa = Any Amino Acid
CCEWACNPACTGXXXXA

SEQ ID NO: 14243 - protein, 12 aa, Artificial Sequence
  Synthetically generated peptide
CELCINVACTGC

SEQ ID NO: 14244 - protein, 12 aa, Artificial Sequence
  Synthetically generated peptide
CELCVNVACTGC

SEQ ID NO: 14245 - protein, 10 aa, Artificial Sequence
  Synthetically generated peptide
CAELCCNPAC

SEQ ID NO: 14246 - protein, 13 aa, Artificial Sequence
  Synthetically generated peptide
CCGLCCNPACAGC

SEQ ID NO: 14247 - protein, 13 aa, Artificial Sequence
  Synthetically generated peptide
CCGLCCYPACAGC

SEQ ID NO: 14248 - protein, 12 aa, Artificial Sequence
  Synthetically generated peptide
CELCCNPACAGC

SEQ ID NO: 14249 - protein, 13 aa, Artificial Sequence
  Synthetically generated peptide
CCDVCCYPACTGC

SEQ ID NO: 14250 - protein, 13 aa, Artificial Sequence
  Synthetically generated peptide
CCELCCNPACAGC

SEQ ID NO: 14251 - protein, 13 aa, Artificial Sequence
  Synthetically generated peptide
CCELCCYPACAGC

SEQ ID NO: 14252 - protein, 13 aa, Artificial Sequence
  Synthetically generated peptide
CCELCCNPACTGC

SEQ ID NO: 14253 - protein, 13 aa, Artificial Sequence
  Synthetically generated peptide
CCELCCYPACTGC

SEQ ID NO: 14254 - protein, 13 aa, Artificial Sequence
  Synthetically generated peptide
CCELCCNPGCTGC

SEQ ID NO: 14255 - protein, 13 aa, Artificial Sequence
  Synthetically generated peptide
CCEACCNPACTGC

SEQ ID NO: 14256 - protein, 13 aa, Artificial Sequence
  Synthetically generated peptide
CCEKCCNPACTGC

SEQ ID NO: 14257 - protein, 13 aa, Artificial Sequence
  Synthetically generated peptide
CCELCCNPACTAC

SEQ ID NO: 14258 - protein, 13 aa, Artificial Sequence
  Synthetically generated peptide
CCPLCCNPACTGC

SEQ ID NO: 14259 - protein, 13 aa, Artificial Sequence
  Synthetically generated peptide
ACELCANPACTGC

SEQ ID NO: 14260 - protein, 13 aa, Artificial Sequence
  Synthetically generated peptide
CCELACNPACTGA

SEQ ID NO: 14261 - protein, 12 aa, Artificial Sequence
  Synthetically generated peptide
CELCANPACTGC

SEQ ID NO: 14262 - protein, 10 aa, Artificial Sequence
  Synthetically generated peptide
CCELACNPAC

SEQ ID NO: 14263 - protein, 13 aa, Artificial Sequence
  Synthetically generated peptide
CCDVCCNPACAGC

SEQ ID NO: 14264 - protein, 13 aa, Artificial Sequence
  Synthetically generated peptide
CCDVCCNPACTGC

SEQ ID NO: 14265 - protein, 14 aa, Artificial Sequence
  Synthetically generated peptide
CCDVCCNPACAGCY

SEQ ID NO: 14266 - protein, 14 aa, Artificial Sequence
  Synthetically generated peptide
CCDVCCNPACTGCY

SEQ ID NO: 14267 - protein, 13 aa, Artificial Sequence
  Synthetically generated peptide
CCELCCYPACAGC

SEQ ID NO: 14268 - protein, 12 aa, Artificial Sequence
  Synthetically generated peptide
CCICCNPACFGC

SEQ ID NO: 14269 - protein, 11 aa, Artificial Sequence
  Synthetically generated peptide
CCNYCCSPCGC

SEQ ID NO: 14270 - protein, 13 aa, Artificial Sequence
  Synthetically generated peptide
  VARIANT (3)..(4): Xaa = Any Amino Acid
  misc_feature (7)..(7): Xaa can be any naturally occurring amino acid
  misc_feature (11)..(11): Xaa can be any naturally occurring amino acid
CCXXCCXPACXGC

SEQ ID NO: 14271 - protein, 13 aa, Artificial Sequence
  Synthetically generated peptide
  VARIANT (1)..(13): Xaa = Any Amino Acid
CCIXCCNPACFGC

SEQ ID NO: 14272 - protein, 13 aa, Artificial Sequence
  Synthetically generated peptide
  VARIANT (1)..(13): Xaa = Any Amino Acid
CCNYCCSPXCXGC

SEQ ID NO: 14273 - protein, 54 aa, Artificial Sequence; identical to SEQ ID NO: 100
  Synthetically generated peptide

SEQ ID NO: 14274 - protein, 14 aa, Artificial Sequence
  Synthetically generated peptide
  VARIANT (4)..(14): Xaa = Any Amino Acid
CCEXCCNPACTGCX

SEQ ID NO: 14275 - protein, 6 aa, Artificial Sequence
  Synthetically generated peptide
  VARIANT (4)..(6): Xaa = Arg or Lys
  VARIANT (5)..(5): Xaa = Trp or Ile
RYYXXX

SEQ ID NO: 14276 - protein, 6 aa, Artificial Sequence
  Synthetically generated peptide
KYYRWR

SEQ ID NO: 14277 - protein, 6 aa, Artificial Sequence
  Synthetically generated peptide
RYYRWR

SEQ ID NO: 14278 - protein, 6 aa, Artificial Sequence
  Synthetically generated peptide
KWRYYR

SEQ ID NO: 14279 - protein, 6 aa, Artificial Sequence
  Synthetically generated peptide
RYYRWK

SEQ ID NO: 14280 - protein, 6 aa, Artificial Sequence
  Synthetically generated peptide
RYYRIK

SEQ ID NO: 14281 - protein, 6 aa, Artificial Sequence
  Synthetically generated peptide
RYYRIR

SEQ ID NO: 14282 - protein, 6 aa, Artificial Sequence
  Synthetically generated peptide
RYYKIK

SEQ ID NO: 14283 - protein, 6 aa, Artificial Sequence
  Synthetically generated peptide
RYYKIR

SEQ ID NO: 14284 - protein, 6 aa, Artificial Sequence
  Synthetically generated peptide
RYYKWR

SEQ ID NO: 14285 - protein, 6 aa, Artificial Sequence
  Synthetically generated peptide
RYYKWK

SEQ ID NO: 14286 - protein, 6 aa, Artificial Sequence
  Synthetically generated peptide
RYYRWR

SEQ ID NO: 14287 - protein, 6 aa, Artificial Sequence
  Synthetically generated peptide
RYYRWK

SEQ ID NO: 14288 - protein, 6 aa, Artificial Sequence
  Synthetically generated peptide
RYYRIK

SEQ ID NO: 14289 - protein, 6 aa, Artificial Sequence
  Synthetically generated peptide
RYYKWR

SEQ ID NO: 14290 - protein, 6 aa, Artificial Sequence
  Synthetically generated peptide
RYYKWK

SEQ ID NO: 14291 - protein, 6 aa, Artificial Sequence
  Synthetically generated peptide
RYYRWK

SEQ ID NO: 14292 - protein, 6 aa, Artificial Sequence
  Synthetically generated peptide
KYYRWK

SEQ ID NO: 14293 - protein, 11 aa, Human immunodeficiency virus
YGRKKRRQRRR

SEQ ID NO: 14294 - protein, 11 aa, Human immunodeficiency virus
YARKARRQARR

SEQ ID NO: 14295 - protein, 11 aa, Human immunodeficiency virus
YARAAARQARA

SEQ ID NO: 14296 - protein, 11 aa, Human immunodeficiency virus
YARAARRAARR

SEQ ID NO: 14297 - protein, 11 aa, Human immunodeficiency virus
YARAARRAARA

SEQ ID NO: 14298 - protein, 10 aa, Human immunodeficiency virus
ARRRRRRRRR

SEQ ID NO: 14299 - protein, 11 aa, Human immunodeficiency virus
YAAARRRRRRR

SEQ ID NO: 14300 - protein, 4 aa, Artificial Sequence
  Synthetically generated peptide
FALA

SEQ ID NO: 14301 - protein, 5 aa, Artificial Sequence
  Synthetically generated peptide
VLALA

SEQ ID NO: 14302 - protein, 4 aa, Artificial Sequence
  Synthetically generated peptide
ALAL

SEQ ID NO: 14303 - protein, 5 aa, Artificial Sequence
  Synthetically generated peptide
ALALA

SEQ ID NO: 14304 - protein, 13 aa, Artificial Sequence
  Synthetically generated peptide
CCDVCCNPACAGC

SEQ ID NO: 14305 - protein, 13 aa, Artificial Sequence
  Synthetically generated peptide
CCDACCNPACAGC

SEQ ID NO: 14306 - protein, 13 aa, Artificial Sequence
  Synthetically generated peptide
CCDCCCNPACAGC

SEQ ID NO: 14307 - protein, 13 aa, Artificial Sequence
  Synthetically generated peptide
CCDDCCNPACAGC

SEQ ID NO: 14308 - protein, 13 aa, Artificial Sequence
  Synthetically generated peptide
CCDECCNPACAGC

SEQ ID NO: 14309 - protein, 13 aa, Artificial Sequence
  Synthetically generated peptide
CCDFCCNPACAGC

SEQ ID NO: 14310 - protein, 13 aa, Artificial Sequence
  Synthetically generated peptide
CCDGCCNPACAGC

SEQ ID NO: 14311 - protein, 13 aa, Artificial Sequence
  Synthetically generated peptide
CCDHCCNPACAGC

SEQ ID NO: 14312 - protein, 13 aa, Artificial Sequence
  Synthetically generated peptide
CCDICCNPACAGC

SEQ ID NO: 14313 - protein, 13 aa, Artificial Sequence
  Synthetically generated peptide
CCDKCCNPACAGC

SEQ ID NO: 14314 - protein, 13 aa, Artificial Sequence
  Synthetically generated peptide
CCDLCCNPACAGC

SEQ ID NO: 14315 - protein, 13 aa, Artificial Sequence
  Synthetically generated peptide
CCDMCCNPACAGC

SEQ ID NO: 14316 - protein, 13 aa, Artificial Sequence
  Synthetically generated peptide
CCDNCCNPACAGC

SEQ ID NO: 14317 - protein, 13 aa, Artificial Sequence
  Synthetically generated peptide
CCDPCCNPACAGC

SEQ ID NO: 14318 - protein, 13 aa, Artificial Sequence
  Synthetically generated peptide
CCDQCCNPACAGC

SEQ ID NO: 14319 - protein, 13 aa, Artificial Sequence
  Synthetically generated peptide
CCDRCCNPACAGC

SEQ ID NO: 14320 - protein, 13 aa, Artificial Sequence
  Synthetically generated peptide
CCDSCCNPACAGC

SEQ ID NO: 14321 - protein, 13 aa, Artificial Sequence
  Synthetically generated peptide
CCDTCCNPACAGC

SEQ ID NO: 14322 - protein, 13 aa, Artificial Sequence
  Synthetically generated peptide
CCDWCCNPACAGC

SEQ ID NO: 14323 - protein, 13 aa, Artificial Sequence
  Synthetically generated peptide
CCDYCCNPACAGC

SEQ ID NO: 14324 - protein, 13 aa, Artificial Sequence
  Synthetically generated peptide
CCEICCNPACFGC

SEQ ID NO: 14325 - protein, 13 aa, Artificial Sequence
  Synthetically generated peptide
CCEACCNPACFGC

SEQ ID NO: 14326 - protein, 13 aa, Artificial Sequence
  Synthetically generated peptide
CCECCCNPACFGC

SEQ ID NO: 14327 - protein, 13 aa, Artificial Sequence
  Synthetically generated peptide
CCEDCCNPACFGC

SEQ ID NO: 14328 - protein, 13 aa, Artificial Sequence
  Synthetically generated peptide
CCEECCNPACFGC

SEQ ID NO: 14329 - protein, 13 aa, Artificial Sequence
  Synthetically generated peptide
CCEFCCNPACFGC

SEQ ID NO: 14330 - protein, 13 aa, Artificial Sequence
  Synthetically generated peptide
CCEGCCNPACFGC

SEQ ID NO: 14331 - protein, 13 aa, Artificial Sequence
  Synthetically generated peptide
CCEHCCNPACFGC

SEQ ID NO: 14332 - protein, 13 aa, Artificial Sequence
  Synthetically generated peptide
CCEKCCNPACFGC

SEQ ID NO: 14333 - protein, 13 aa, Artificial Sequence
  Synthetically generated peptide
CCELCCNPACFGC

SEQ ID NO: 14334 - protein, 13 aa, Artificial Sequence
  Synthetically generated peptide
CCEMCCNPACFGC

SEQ ID NO: 14335 - protein, 13 aa, Artificial Sequence
  Synthetically generated peptide
CCENCCNPACFGC

SEQ ID NO: 14336 - protein, 13 aa, Artificial Sequence
  Synthetically generated peptide
CCEPCCNPACFGC

SEQ ID NO: 14337 - protein, 13 aa, Artificial Sequence
  Synthetically generated peptide
CCEQCCNPACFGC

SEQ ID NO: 14338 - protein, 13 aa, Artificial Sequence
  Synthetically generated peptide
CCERCCNPACFGC

SEQ ID NO: 14339 - protein, 13 aa, Artificial Sequence
  Synthetically generated peptide
CCESCCNPACFGC

SEQ ID NO: 14340 - protein, 13 aa, Artificial Sequence
  Synthetically generated peptide
CCETCCNPACFGC

SEQ ID NO: 14341 - protein, 13 aa, Artificial Sequence
  Synthetically generated peptide
CCEVCCNPACFGC

SEQ ID NO: 14342 - protein, 13 aa, Artificial Sequence
  Synthetically generated peptide
CCEWCCNPACFGC

SEQ ID NO: 14343 - protein, 13 aa, Artificial Sequence
  Synthetically generated peptide
CCEYCCNPACFGC

SEQ ID NO: 14344 - protein, 13 aa, Artificial Sequence
  Synthetically generated peptide
CCELCCNPACAPC

SEQ ID NO: 14345 - protein, 13 aa, Artificial Sequence
  Synthetically generated peptide
CCEACCNPACAPC

SEQ ID NO: 14346 - protein, 13 aa, Artificial Sequence
  Synthetically generated peptide
CCECCCNPACAPC

SEQ ID NO: 14347 - protein, 13 aa, Artificial Sequence
  Synthetically generated peptide
CCEDCCNPACAPC

SEQ ID NO: 14348 - protein, 13 aa, Artificial Sequence
  Synthetically generated peptide
CCEECCNPACAPC

SEQ ID NO: 14349 - protein, 13 aa, Artificial Sequence
  Synthetically generated peptide
CCEFCCNPACAPC

SEQ ID NO: 14350 - protein, 13 aa, Artificial Sequence
  Synthetically generated peptide
CCEGCCNPACAPC

SEQ ID NO: 14351 - protein, 13 aa, Artificial Sequence
  Synthetically generated peptide
CCEHCCNPACAPC

SEQ ID NO: 14352 - protein, 13 aa, Artificial Sequence
  Synthetically generated peptide
CCEICCNPACAPC

SEQ ID NO: 14353 - protein, 13 aa, Artificial Sequence
  Synthetically generated peptide
CCEKCCNPACAPC

SEQ ID NO: 14354 - protein, 13 aa, Artificial Sequence
  Synthetically generated peptide
CCEMCCNPACAPC

SEQ ID NO: 14355 - protein, 13 aa, Artificial Sequence
  Synthetically generated peptide
CCENCCNPACAPC

SEQ ID NO: 14356 - protein, 13 aa, Artificial Sequence
  Synthetically generated peptide
CCEPCCNPACAPC

SEQ ID NO: 14357 - protein, 13 aa, Artificial Sequence
  Synthetically generated peptide
CCEQCCNPACAPC

SEQ ID NO: 14358 - protein, 13 aa, Artificial Sequence
  Synthetically generated peptide
CCERCCNPACAPC

SEQ ID NO: 14359 - protein, 13 aa, Artificial Sequence
  Synthetically generated peptide
CCESCCNPACAPC

SEQ ID NO: 14360 - protein, 13 aa, Artificial Sequence
  Synthetically generated peptide
CCETCCNPACAPC

SEQ ID NO: 14361 - protein, 13 aa, Artificial Sequence
  Synthetically generated peptide
CCEVCCNPACAPC

SEQ ID NO: 14362 - protein, 13 aa, Artificial Sequence
  Synthetically generated peptide
CCEWCCNPACAPC

SEQ ID NO: 14363 - protein, 13 aa, Artificial Sequence
  Synthetically generated peptide
CCEYCCNPACAPC

SEQ ID NO: 14364 - protein, 13 aa, Artificial Sequence
  Synthetically generated peptide
CCELCCNPACFGC

SEQ ID NO: 14365 - protein, 13 aa, Artificial Sequence
  Synthetically generated peptide
CCEACCNPACFGC

SEQ ID NO: 14366 - protein, 13 aa, Artificial Sequence
  Synthetically generated peptide
CCECCCNPACFGC

SEQ ID NO: 14367 - protein, 13 aa, Artificial Sequence
  Synthetically generated peptide
CCEDCCNPACFGC

SEQ ID NO: 14368 - protein, 13 aa, Artificial Sequence
  Synthetically generated peptide
CCEECCNPACFGC

SEQ ID NO: 14369 - protein, 13 aa, Artificial Sequence
  Synthetically generated peptide
CCEFCCNPACFGC

SEQ ID NO: 14370 - protein, 13 aa, Artificial Sequence
  Synthetically generated peptide
CCEGCCNPACFGC

SEQ ID NO: 14371 - protein, 13 aa, Artificial Sequence
  Synthetically generated peptide
CCEHCCNPACFGC

SEQ ID NO: 14372 - protein, 13 aa, Artificial Sequence
  Synthetically generated peptide
CCEICCNPACFGC

SEQ ID NO: 14373 - protein, 13 aa, Artificial Sequence
  Synthetically generated peptide
CCEKCCNPACFGC

SEQ ID NO: 14374 - protein, 13 aa, Artificial Sequence
  Synthetically generated peptide
CCEMCCNPACFGC

SEQ ID NO: 14375 - protein, 13 aa, Artificial Sequence
  Synthetically generated peptide
CCENCCNPACFGC

SEQ ID NO: 14376 - protein, 13 aa, Artificial Sequence
  Synthetically generated peptide
CCEPCCNPACFGC

SEQ ID NO: 14377 - protein, 13 aa, Artificial Sequence
  Synthetically generated peptide
CCEQCCNPACFGC

SEQ ID NO: 14378 - protein, 13 aa, Artificial Sequence
  Synthetically generated peptide
CCERCCNPACFGC

SEQ ID NO: 14379 - protein, 13 aa, Artificial Sequence
  Synthetically generated peptide
CCESCCNPACFGC

SEQ ID NO: 14380 - protein, 13 aa, Artificial Sequence
  Synthetically generated peptide
CCETCCNPACFGC

SEQ ID NO: 14381 - protein, 13 aa, Artificial Sequence
  Synthetically generated peptide
CCEVCCNPACFGC

SEQ ID NO: 14382 - protein, 13 aa, Artificial Sequence
  Synthetically generated peptide
CCEWCCNPACFGC

SEQ ID NO: 14383 - protein, 13 aa, Artificial Sequence
  Synthetically generated peptide
CCEYCCNPACFGC

SEQ ID NO: 14384 - protein, 13 aa, Artificial Sequence
  Synthetically generated peptide
CCEVCCNPACAGC

SEQ ID NO: 14385 - protein, 13 aa, Artificial Sequence
  Synthetically generated peptide
CCEACCNPACAGC

SEQ ID NO: 14386 - protein, 13 aa, Artificial Sequence
  Synthetically generated peptide
CCECCCNPACAGC

SEQ ID NO: 14387 - protein, 13 aa, Artificial Sequence
  Synthetically generated peptide
CCEDCCNPACAGC

SEQ ID NO: 14388 - protein, 13 aa, Artificial Sequence
  Synthetically generated peptide
CCEECCNPACAGC

SEQ ID NO: 14389 - protein, 13 aa, Artificial Sequence
  Synthetically generated peptide
CCEFCCNPACAGC

SEQ ID NO: 14390 - protein, 13 aa, Artificial Sequence
  Synthetically generated peptide
CCEGCCNPACAGC

SEQ ID NO: 14391 - protein, 13 aa, Artificial Sequence
  Synthetically generated peptide
CCEHCCNPACAGC

SEQ ID NO: 14392 - protein, 13 aa, Artificial Sequence
  Synthetically generated peptide
CCEICCNPACAGC

SEQ ID NO: 14393 - protein, 13 aa, Artificial Sequence
  Synthetically generated peptide
CCEKCCNPACAGC

SEQ ID NO: 14394 - protein, 13 aa, Artificial Sequence
  Synthetically generated peptide
CCELCCNPACAGC

SEQ ID NO: 14395 - protein, 13 aa, Artificial Sequence
  Synthetically generated peptide
CCEMCCNPACAGC

SEQ ID NO: 14396 - protein, 13 aa, Artificial Sequence
  Synthetically generated peptide
CCENCCNPACAGC

SEQ ID NO: 14397 - protein, 13 aa, Artificial Sequence
  Synthetically generated peptide
CCEPCCNPACAGC

SEQ ID NO: 14398 - protein, 13 aa, Artificial Sequence
  Synthetically generated peptide
CCEQCCNPACAGC

SEQ ID NO: 14399 - protein, 13 aa, Artificial Sequence
  Synthetically generated peptide
CCERCCNPACAGC

SEQ ID NO: 14400 - protein, 13 aa, Artificial Sequence
  Synthetically generated peptide
CCESCCNPACAGC

SEQ ID NO: 14401 - protein, 13 aa, Artificial Sequence
  Synthetically generated peptide
CCETCCNPACAGC

SEQ ID NO: 14402 - protein, 13 aa, Artificial Sequence
  Synthetically generated peptide
CCEWCCNPACAGC

SEQ ID NO: 14403 - protein, 13 aa, Artificial Sequence
  Synthetically generated peptide
CCEYCCNPACAGC

SEQ ID NO: 14404 - protein, 19 aa, Artificial Sequence
  Synthetically generated peptide
MKKLMLAIFISVLSFPSFS

SEQ ID NO: 14405 - protein, 35 aa, Artificial Sequence
  Synthetically generated peptide
QSTESLDSSKEKITLETKKCDVVKNNSEKKSENMN

SEQ ID NO: 14406 - protein, 54 aa, Artificial Sequence
  Synthetically generated peptide
MKKLMLAIFISVLSFPSFSQSTESLDSSKEKITLETKKCDVVKNNSEKKSENMN

SEQ ID NO: 14407 - protein, 18 aa, Artificial Sequence
  Synthetically generated peptide
NTFYCCELCCNPACAGCY

SEQ ID NO: 14408 - protein, 4 aa, Artificial Sequence
  Synthetically generated peptide
NTFY

SEQ ID NO: 14409 - protein, 13 aa, Artificial Sequence
  Synthetically generated peptide
CCELCCNPACAGC

SEQ ID NO: 14410 - protein, 72 aa, Artificial Sequence; identical to SEQ ID NO: 121
  Synthetically generated peptide

SEQ ID NO: 14411 - protein, 53 aa, Artificial Sequence
  Synthetically generated peptide
QSTESLDSSKEKITLETKKCDVVKNNSEKKSENMNNTFYCCELCCNPACAGCY

SEQ ID NO: 14412 - protein, 37 aa, Artificial Sequence
  Synthetically generated peptide
MKKLMLAIFISVLSFPSFSNTFYCCELCCNPACAGCY

SEQ ID NO: 14413 - protein, 13 aa, Artificial Sequence
  Synthetically generated peptide
CCELCCNPACAPC

SEQ ID NO: 14414 - protein, 19 aa, Artificial Sequence
  Synthetically generated peptide
MKKSILFIFLSVLSFSPFP

SEQ ID NO: 14415 - protein, 34 aa, Artificial Sequence
  Synthetically generated peptide
QDAKPVESSKEKITLESKKCNIAKKSNKSGPESM

SEQ ID NO: 14416 - protein, 53 aa, Artificial Sequence
  Synthetically generated peptide
MKKSILFIFLSVLSFSPFPQDAKPVESSKEKITLESKKCNIAKKSNKSGPESM

SEQ ID NO: 14417 - protein, 19 aa, Artificial Sequence
  Synthetically generated peptide
NSSNYCCELCCNPACTGCY

SEQ ID NO: 14418 - protein, 5 aa, Artificial Sequence
  Synthetically generated peptide
NSSNY

SEQ ID NO: 14419 - protein, 13 aa, Artificial Sequence
  Synthetically generated peptide
CCELCCNPACTGC

SEQ ID NO: 14420 - protein, 72 aa, Artificial Sequence
  Synthetically generated peptide
MKKSILFIFLSVLSFSPFPQDAKPVESSKEKITLESKKCNIAKKSNKSGPESMNSSNYCCELCCNPACTGCY

SEQ ID NO: 14421 - protein, 53 aa, Artificial Sequence
  Synthetically generated peptide
QDAKPVESSKEKITLESKKCNIAKKSNKSGPESMNSSNYCCELCCNPACTGCY

SEQ ID NO: 14422 - protein, 38 aa, Artificial Sequence
  Synthetically generated peptide
MKKSILFIFLSVLSFSPFPNSSNYCCELCCNPACTGCY

SEQ ID NO: 14423 - protein, 19 aa, Artificial Sequence
  Synthetically generated peptide
MKKSILFIFLSVLSFSPFA

SEQ ID NO: 14424 - protein, 34 aa, Artificial Sequence
  Synthetically generated peptide
QDAKPAGSSKEKITLESKKCNIVKKNNESSPESM

SEQ ID NO: 14425 - protein, 53 aa, Artificial Sequence; identical to SEQ ID NO: 125
  Synthetically generated peptide

SEQ ID NO: 14426 - protein, 72 aa, Artificial Sequence
  Synthetically generated peptide
MKKSILFIFLSVLSFSPFAQDAKPAGSSKEKITLESKKCNIVKKNNESSPESMNSSNYCCELCCNPACTGCY

SEQ ID NO: 14427 - protein, 53 aa, Artificial Sequence
  Synthetically generated peptide
QDAKPAGSSKEKITLESKKCNIVKKNNESSPESMNSSNYCCELCCNPACTGCY

SEQ ID NO: 14428 - protein, 19 aa, Artificial Sequence
  Synthetically generated peptide
MKKSILFIFLSVLSFSPFA

SEQ ID NO: 14429 - protein, 34 aa, Artificial Sequence; identical to SEQ ID NO: 14415
  Synthetically generated peptide

SEQ ID NO: 14430 - protein, 53 aa, Artificial Sequence
  Synthetically generated peptide
MKKSILFIFLSVLSFSPFAQDAKPVESSKEKITLESKKCNIAKKSNKSGPESM

SEQ ID NO: 14431 - protein, 19 aa, Artificial Sequence
  Synthetically generated peptide
NSSNYCCELCCNPACTGCY

SEQ ID NO: 14432 - protein, 12 aa, Artificial Sequence
  Synthetically generated peptide
CCELCCNPACTG

SEQ ID NO: 14433 - protein, 42 aa, Artificial Sequence
  Synthetically generated peptide
VLSFSPFAQDAKPVESSKEKITLESKKCNIAKKSNKSDPESM

SEQ ID NO: 14434 - protein, 61 aa, Artificial Sequence
  Synthetically generated peptide
VLSFSPFAQDAKPVESSKEKITLESKKCNIAKKSNKSDPESMNSSNYCCELCCNPACTGCY

SEQ ID NO: 14435 - protein, 19 aa, Artificial Sequence
  Synthetically generated peptide
MKKIVFVLVLMLSSFGAFG

SEQ ID NO: 14436 - protein, 34 aa, Artificial Sequence
  Synthetically generated peptide
QETVSGQFSDALSTPITAEVYKQACDPPLPPAEV

SEQ ID NO: 14437 - protein, 53 aa, Artificial Sequence
  Synthetically generated peptide
MKKIVFVLVLMLSSFGAFGQETVSGQFSDALSTPITAEVYKQACDPPLPPAEV

SEQ ID NO: 14438 - protein, 18 aa, Artificial Sequence
  Synthetically generated peptide
SSDWDCCDVCCNPACAGC

SEQ ID NO: 14439 - protein, 5 aa, Artificial Sequence
  Synthetically generated peptide
SSDWD

SEQ ID NO: 14440 - protein, 13 aa, Artificial Sequence
  Synthetically generated peptide
CCDVCCNPACAGC

SEQ ID NO: 14441 - protein, 71 aa, Artificial Sequence; identical to SEQ ID NO: 123
  Synthetically generated peptide

SEQ ID NO: 14442 - protein, 52 aa, Artificial Sequence
  Synthetically generated peptide
QETVSGQFSDALSTPITAEVYKQACDPPLPPAEVSSDWDCCDVCCNPACAGC

SEQ ID NO: 14443 - protein, 12 aa, Artificial Sequence
  Synthetically generated peptide
QACDPPSPPAEV

SEQ ID NO: 14444 - protein, 30 aa, Artificial Sequence; identical to SEQ ID NO: 104
  Synthetically generated peptide

SEQ ID NO: 14445 - protein, 19 aa, Artificial Sequence
  Synthetically generated peptide
MKKIILALVLMLFSFCTLG

SEQ ID NO: 14446 - protein, 33 aa, Artificial Sequence
  Synthetically generated peptide
QETASMHLDDTLSAPIAAEINRKACDTQTPSPS

SEQ ID NO: 14447 - protein, 52 aa, Artificial Sequence
  Synthetically generated peptide
MKKIILALVLMLFSFCTLGQETASMHLDDTLSAPIAAEINRKACDTQTPSPS

SEQ ID NO: 14448 - protein, 19 aa, Artificial Sequence
  Synthetically generated peptide
EENDDWCCEVCCNPACAGC

SEQ ID NO: 14449 - protein, 6 aa, Artificial Sequence
  Synthetically generated peptide
EENDDW

SEQ ID NO: 14450 - protein, 13 aa, Artificial Sequence
  Synthetically generated peptide
CCEVCCNPACAGC

SEQ ID NO: 14451 - protein, 71 aa, Artificial Sequence
  Synthetically generated peptide
MKKIILALVLMLFSFCTLGQETASMHLDDTLSAPIAAEINRKACDTQTPSPSEENDDWCCEVCCNPACAGC

SEQ ID NO: 14452 - protein, 52 aa, Artificial Sequence
  Synthetically generated peptide
QETASMHLDDTLSAPIAAEINRKACDTQTPSPSEENDDWCCEVCCNPACAGC

SEQ ID NO: 14453 - protein, 38 aa, Artificial Sequence
  Synthetically generated peptide
MKKIILALVLMLFSFCTLGEENDDWCCEVCCNPACAGC

SEQ ID NO: 14454 - protein, 11 aa, Artificial Sequence
  Synthetically generated peptide
KACDTQTPSPS

SEQ ID NO: 14455 - protein, 30 aa, Artificial Sequence; identical to SEQ ID NO: 106
  Synthetically generated peptide

SEQ ID NO: 14456 - protein, 19 aa, Artificial Sequence
  Synthetically generated peptide
MKKIVFVLTLMLFSFGTLG

SEQ ID NO: 14457 - protein, 34 aa, Artificial Sequence
  Synthetically generated peptide
QETASGQVGDVSSSTIATEVSEAECGTQSATTQG

SEQ ID NO: 14458 - protein, 53 aa, Artificial Sequence
  Synthetically generated peptide
MKKIVFVLTLMLFSFGTLGQETASGQVGDVSSSTIATEVSEAECGTQSATTQG

SEQ ID NO: 14459 - protein, 19 aa, Artificial Sequence
  Synthetically generated peptide
ENDWDWCCELCCNPACFGC

SEQ ID NO: 14460 - protein, 6 aa, Artificial Sequence
  Synthetically generated peptide
ENDWDW

SEQ ID NO: 14461 - protein, 13 aa, Artificial Sequence
  Synthetically generated peptide
CCELCCNPACFGC

SEQ ID NO: 14462 - protein, 72 aa, Artificial Sequence
  Synthetically generated peptide
MKKIVFVLTLMLFSFGTLGQETASGQVGDVSSSTIATEVSEAECGTQSATTQGENDWDWCCELCCNPACFGC

SEQ ID NO: 14463 - protein, 53 aa, Artificial Sequence; identical to SEQ ID NO: 107
  Synthetically generated peptide

SEQ ID NO: 14464 - protein, 38 aa, Artificial Sequence
  Synthetically generated peptide
MKKIVFVLTLMLFSFGTLGENDWDWCCELCCNPACFGC

SEQ ID NO: 14465 - protein, 19 aa, Artificial Sequence
  Synthetically generated peptide
MKKIVFVLVLMLSSFGTFG

SEQ ID NO: 14466 - protein, 31 aa, Artificial Sequence
  Synthetically generated peptide
QETASRQFGDAFSTPIAAEVNKKACDTELPP

SEQ ID NO: 14467 - protein, 50 aa, Artificial Sequence
  Synthetically generated peptide
MKKIVFVLVLMLSSFGTFGQETASRQFGDAFSTPIAAEVNKKACDTELPP

SEQ ID NO: 14468 - protein, 16 aa, Artificial Sequence
  Synthetically generated peptide
SDWCCEVCCNPACAGC

SEQ ID NO: 14469 - protein, 13 aa, Artificial Sequence
  Synthetically generated peptide
CCEVCCNPACAGC

SEQ ID NO: 14470 - protein, 66 aa, Artificial Sequence
  Synthetically generated peptide
MKKIVFVLVLMLSSFGTFGQETASRQFGDAFSTPIAAEVNKKACDTELPPSDWCCEVCCNPACAGC

SEQ ID NO: 14471 - protein, 47 aa, Artificial Sequence
  Synthetically generated peptide
QETASRQFGDAFSTPIAAEVNKKACDTELPPSDWCCEVCCNPACAGC

SEQ ID NO: 14472 - protein, 35 aa, Artificial Sequence
  Synthetically generated peptide
MKKIVFVLVLMLSSFGTFGSDWCCEVCCNPACAGC

SEQ ID NO: 14473 - protein, 18 aa, Artificial Sequence
  Synthetically generated peptide
LIDCCEICCNPACFGCLN

SEQ ID NO: 14474 - protein, 13 aa, Artificial Sequence
  Synthetically generated peptide
CCEICCNPACFGC

SEQ ID NO: 14475 - protein, 19 aa, Artificial Sequence
  Synthetically generated peptide
NLIDCCEICCNPACFGCLN

SEQ ID NO: 14476 - protein, 18 aa, Artificial Sequence
  Synthetically generated peptide
MKNLFIALMLLFSSIALS

SEQ ID NO: 14477 - protein, 43 aa, Artificial Sequence
  Synthetically generated peptide
QTVENDTKTVQQPQQIESKVNIKKLSENEECPFIKQVDENGNL

SEQ ID NO: 14478 - protein, 61 aa, Artificial Sequence
  Synthetically generated peptide
MKNLFIALMLLFSSIALSQTVENDTKTVQQPQQIESKVNIKKLSENEECPFIKQVDENGNL

SEQ ID NO: 14479 - protein, 17 aa, Artificial Sequence
  Synthetically generated peptide
IDCCEICCNPACFGCLN

SEQ ID NO: 14480 - protein, 78 aa, Artificial Sequence
  Synthetically generated peptide
MKNLFIALMLLFSSIALSQTVENDTKTVQQPQQIESKVNIKKLSENEECPFIKQVDENGNLIDCCEICCNPACFGCLN

SEQ ID NO: 14481 - protein, 60 aa, Artificial Sequence
  Synthetically generated peptide
QTVENDTKTVQQPQQIESKVNIKKLSENEECPFIKQVDENGNLIDCCEICCNPACFGCLN

SEQ ID NO: 14482 - protein, 18 aa, Artificial Sequence
  Synthetically generated peptide
MRNLFIALMLLFSSIAFS

SEQ ID NO: 14483 - protein, 43 aa, Artificial Sequence
  Synthetically generated peptide
QTVENNKKTVQQPQQIESKVNIKKLSENEECPFIKQVDENGNL

SEQ ID NO: 14484 - protein, 61 aa, Artificial Sequence
  Synthetically generated peptide
MRNLFIALMLLFSSIAFSQTVENNKKTVQQPQQIESKVNIKKLSENEECPFIKQVDENGNL

SEQ ID NO: 14485 - protein, 78 aa, Artificial Sequence
  Synthetically generated peptide
MRNLFIALMLLFSSIAFSQTVENNKKTVQQPQQIESKVNIKKLSENEECPFIKQVDENGNLIDCCEICCNPACFGCLN

SEQ ID NO: 14486 - protein, 60 aa, Artificial Sequence
  Synthetically generated peptide
QTVENNKKTVQQPQQIESKVNIKKLSENEECPFIKQVDENGNLIDCCEICCNPACFGCLN

SEQ ID NO: 14487 - protein, 35 aa, Artificial Sequence
  Synthetically generated peptide
MRNLFIALMLLFSSIAFSIDCCEICCNPACFGCLN

SEQ ID NO: 14488 - protein, 18 aa, Artificial Sequence
  Synthetically generated peptide
MKNLFIALMLLFSSIAFS

SEQ ID NO: 14489 - protein, 43 aa, Artificial Sequence
  Synthetically generated peptide
RTVEDNKKTVQQPQQIESKVNIKKPSENEECPVIKQVDENGNL

SEQ ID NO: 14490 - protein, 61 aa, Artificial Sequence
  Synthetically generated peptide
MKNLFIALMLLFSSIAFSRTVEDNKKTVQQPQQIESKVNIKKPSENEECPVIKQVDENGNL

SEQ ID NO: 14491 - protein, 17 aa, Artificial Sequence
  Synthetically generated peptide
IDRCEICCNPACFGCLN

SEQ ID NO: 14492 - protein, 78 aa, Artificial Sequence
  Synthetically generated peptide
MKNLFIALMLLFSSIAFSRTVEDNKKTVQQPQQIESKVNIKKPSENEECPVIKQVDENGNLIDRCEICCNPACFGCLN

SEQ ID NO: 14493 - protein, 60 aa, Artificial Sequence
  Synthetically generated peptide
RTVEDNKKTVQQPQQIESKVNIKKPSENEECPVIKQVDENGNLIDRCEICCNPACFGCLN

SEQ ID NO: 14494 - protein, 35 aa, Artificial Sequence [sequence omitted]

SEQ ID NO: 14495 - protein, 20 aa, Artificial Sequence
  Synthetically generated peptide
LNDANGLINGDRPIRAQHVC
